(19) United States
(12) Patent Application Publication
(10) Pub. No.: US 2013/0122541 A1
(43) Pub. Date: May 16, 2013

(54) MICROORGANISM PRODUCTION OF HIGH-VALUE CHEMICAL PRODUCTS, AND RELATED COMPOSITIONS, METHODS AND SYSTEMS

(71) Applicants: Michael D. Lynch, Boulder, CO (US); Ryan T. Gill, Denver, CO (US); Tanya E.W. Lipscomb, Boulder, CO (US)

(72) Inventors: Michael D. Lynch, Boulder, CO (US); Ryan T. Gill, Denver, CO (US); Tanya E.W. Lipscomb, Boulder, CO (US)

(73) Assignee: The Regents of the University of Colorado

(21) Appl. No.: 13/575,581

(22) PCT Filed: Jan. 27, 2011
(86) PCT No.: PCT/US11/22790

§ 371 Date: Nov. 28, 2012

Related U.S. Application Data
(60) Provisional application No. 61/298,844, filed on Jan. 27, 2010.
(60) Provisional application No. 61/321,480, filed on Apr. 6, 2010.

(51) Int. Cl. C12N 1/21; C12M 1/00; C12P 19/60; C12N 1/19; C12P 29/00; C12P 19/62

(52) U.S. Cl. 435/64; 435/76; 435/75; 435/252.3; 435/252.33; 435/252.34; 435/252.31; 435/254.21; 435/254.23; 435/252.32; 435/254.22; 435/254.2; 435/294.1

(57) ABSTRACT

This invention relates to metabolically engineered microorganism strains, such as bacterial strains, in which there is an increased utilization of malonyl-CoA for production of a chemical product, which includes polyketides and 3-hydroxypropionic acid.

### CROSS-REFERENCE TO RELATED APPLICATIONS

[0001] This application claims priority from U.S. Provisional Application 61/298,844, filed Jan. 27, 2010, and U.S. Provisional Application 61/321,480, filed Apr. 6, 2010. The entire contents of each application are hereby incorporated by reference in their entirety.

### STATEMENT REGARDING FEDERALLY SPONSORED DEVELOPMENT

[0002] This invention was made with Government support under DE-AR0000088 awarded by the United States Department of Energy, and with Government support under grants BES0228584 and BES0449183 awarded by the National Science Foundation. The Government has certain rights in this invention.

### FIELD OF THE INVENTION

[0003] This invention relates to metabolically engineered microorganisms, such as bacterial strains, in which there is an increased utilization of malonyl-CoA for production of a chemical product, which may include polyketide chemicals. Also, genetic modifications may be made to provide one or more chemical product, such as polyketide, biosynthesis pathways in microorganisms.

### Sequence Listing

[0004] The instant application contains a Sequence Listing which has been submitted in ASCII format via EFS-Web and is hereby incorporated by reference in its entirety. Said ASCII copy, created on Jan. 27, 2011, is named OPXX20111 and is 2,236,123 bytes in size.

### BACKGROUND OF THE INVENTION

[0005] With increasing acceptance that petroleum hydrocarbon supplies are decreasing and their costs are ultimately increasing, interest has increased for developing and improving industrial microbial systems for production of chemicals and fuels. Such industrial microbial systems could completely or partially replace the use of petroleum hydrocarbons for production of certain chemicals.

[0006] Numerous chemicals are produced through such means, ranging from antibiotic and anti-malarial pharmaceutical products to fine chemicals to fuels such as ethanol. Commercial objectives for microbial fermentation include the increase of titer, production rate, and yield of a target chemical product. When the overall specific productivity in a fermentation event is elevated, this may positively affect yield in addition to production rate and other economic factors, such as capital costs.

[0007] One candidate chemical for such production is 3-hydroxypropionic acid (“3-HP”, CAS No. 503-66-2), which may be converted to a number of basic building blocks for polymers used in a wide range of industrial and consumer products. Unfortunately, previous efforts to microbially synthesize 3-HP to achieve commercially viable titers have revealed that the microbes being used were inhibited by concentrations of 3-HP far below a determined commercially viable titer.

[0008] Other chemicals of interest include various chemicals that have malony-CoA as a substrate in one or more enzymatic conversion steps.

[0009] In spite of strong interest to improve microbial fermentation economics by improving yield and/or productivity for certain chemical products, there remains a need to increase net conversion, as may be quantified by yield over various periods of or an entire fermentation production run, in a fermentative microorganism cell to desired target chemical products employing commercially viable fermentation methods. Additionally, among related problems remaining to be solved are how to improve specific productivity and volumetric productivity, such as to economically important levels, in modified microorganisms that are adapted to produce a chemical product having malonyl-CoA as a substrate in the microbial production pathway of that chemical product, such as but not limited to various polyketide chemical products.

### SUMMARY OF THE INVENTION

[0010] According to one embodiment, the invention is directed to a method for producing a chemical product, such as a polyketide, said method comprising i) combining a carbon source and a microorganism cell culture to produce such chemical product, wherein a) said cell culture comprises an inhibitor of fatty acid synthase or said microorganism is genetically modified for reduced enzymatic activity in the organism's fatty acid synthase pathway, providing for reduced conversion of malonyl-CoA to fatty acids; and b) wherein said chemical product is a polyketide produced by said microorganism via a metabolic pathway from malonyl-CoA to the polyketide chemical product. This may include embodiments wherein said microorganism is genetically modified for increased enzymatic activity in the organism's chemical product biosynthesis pathway, which includes malonyl-CoA as an intermediate (i.e., as a substrate in one of the biosynthesis enzymatic conversion steps).

[0011] In another embodiment, the invention is directed to a method for producing a chemical product, such as a polyketide, said method comprising i) combining a carbon source and a microorganism cell culture to produce such chemical product, wherein a) said cell culture comprises an inhibitor of fatty acid synthase or said microorganism is genetically modified for reduced enzymatic activity in the organism's fatty acid synthase pathway, providing for reduced conversion of malonyl-CoA to fatty acids; and b) wherein said chemical product is produced by said microorganism via a genetic modification introducing a metabolic pathway from malonyl-CoA to the chemical product. In some such embodiments, the chemical product is not 3-hydroxypropionic acid or an acrylic-based consumer product made there from.

[0012] In various aspects, the carbon source has a ratio of carbon-14 to carbon-12 of about 1.0×10⁻¹⁴ or greater. Also, for any of the above embodiments, the carbon source is predominantly glucose, sucrose, fructose, dextrose, lactose, a combination thereof, or wherein said carbon source is less than 50% glycerol. Also, in various embodiments of the above methods the microorganism is genetically modified for increased enzymatic activity of one or more enzymatic conversion steps from malonyl-CoA to the chemical product, and some such embodiments at least one polynucleotide is provided into the microorganism cell that encodes a polypeptide that catalyzes a conversion step along the metabolic pathway.

[0013] In some of the above embodiments, the cell culture comprises an inhibitor of fatty acid synthase or said microorganism is genetically modified for reduced enzymatic activity in the organism's fatty acid synthase pathway. In some of the latter embodiments, the inhibitor of a fatty acid synthase is selected from the group consisting of thiolactomycin, triclosan, cerulenin, thienodiazaborine, isoniazid, and analogs thereof.

[0014] In various embodiments of the above methods the chemical product is selected from the group consisting of tetracycline, erythromycin, avermectin, macrolides, Vancomycin-group antibiotics, and Type II polyketides. Also, in various embodiments of the above-described method wherein said chemical product is a polyketide, such chemical product is selected from Table 1B. In various embodiments of the above-described method wherein said chemical product is produced by said microorganism via a genetic modification introducing a metabolic pathway from malonyl-CoA to the chemical product, the chemical product is selected from Table 1C.

[0015] Additionally, a recombinant microorganism made in accordance with any of the above embodiments is an aspect of the invention.

[0016] Also, in various embodiments a system is provided, for production of a selected chemical product according to any one of the above embodiments, said system comprising: a fermentation tank suitable for microorganism cell culture; a line for discharging contents from the fermentation tank to an extraction and/or separation vessel; and an extraction and/or separation vessel suitable for removal of the chemical product from cell culture waste. The system may produce various quantities of chemical product, including but not limited to at least 10, at least 100, or at least 1,000 kilograms of chemical product per fermentation event in the fermentation tank.

[0017] In various embodiments a genetically modified microorganism is provided. Such microorganism comprises at least one genetic modification to increase polyketide production, and is capable of producing a at a specific rate selected from the rates of greater than 0.05 g/gDCW-hr, 0.08 g/gDCW-hr, greater than 0.1 g/gDCW-hr, greater than 0.13 g/gDCW-hr, greater than 0.15 g/gDCW-hr, greater than 0.175 g/gDCW-hr, greater than 0.2 g/gDCW-hr, greater than 0.25 g/gDCW-hr, greater than 0.3 g/gDCW-hr, greater than 0.35 g/gDCW-hr, greater than 0.4 g/gDCW-hr, greater than 0.45 g/gDCW-hr, or greater than 0.5 g/gDCW-hr.

[0018] Further, such microorganism may comprise one or more genetic modifications to: increase acetyl-coA carboxylase activity, and reduce enoyl-ACP reductase activity, lactate dehydrogenase activity and acetylphosphate transferase activity; increase acetyl-coA carboxylase activity, and reduce enoyl-ACP reductase activity, lactate dehydrogenase activity and acetate kinase activity; increase acetyl-coA carboxylase activity, and reduce enoyl-ACP reductase activity, lactate dehydrogenase activity, acetate kinase activity and acetylphosphate transferase activity; increase acetyl-coA carboxylase activity, and reduce enoyl-ACP reductase activity, lactate dehydrogenase activity and pyruvate formate lyase activity; increase acetyl-coA carboxylase activity, and reduce enoyl-ACP reductase activity, lactate dehydrogenase activity and pyruvate oxidase activity; increase acetyl-coA carboxylase activity, and reduce enoyl-ACP reductase activity, lactate dehydrogenase activity and pyruvate oxidase activity; acetyl-coA carboxylase activity, and reduce enoyl-ACP reductase activity, lactate dehydrogenase activity and methylglyoxal synthase activity; increase one or more of acetyl-coA carboxylase activity, β-ketoacyl-ACP synthase activity, lactate dehydrogenase activity methylglyoxal synthase activity; and/or increase acetyl-coA carboxylase activity and reduce enoyl-ACP reductase activity, guanosine 3′-diphosphate 5′-triphosphate synthase activity, and guanosine 3′-diphosphate 5′-diphosphate synthase activity. Further, for any of the microorganisms comprising these genetic modifications may comprise additional genetic modification(s) to increase NADH/NADPH transhydrogenase activity, such as by provision of and/or increasing activity of a soluble tranhydrogenase, and/or a transhydrogenase which is membrane-bound. Any of such microorganisms may additionally comprise genetic modifications to increase one or more of the following activities: cyanase; carbonic anhydrase; and pyruvate dehydrogenase.

[0019] The invention also pertains to a genetically modified microorganism comprising one or more components of the 3-HP toleragenic complex (3HPTGC) complex, wherein said increase in tolerance to 3-hydroxypropionic acid results from providing at least one genetic modification of each of Group A and Group B of the 3HPTGC. Such microorganism additionally may comprise a disruption of one or more 3HPTGC repressor genes, and in some such embodiments these repressor genes are selected from tyrR, trpR, metJ, purR, lysR, nrdR, and homologs thereof.

[0020] Also, in various embodiments of the present invention the volumetric productivity achieved may be 0.25 g polyketide (or other chemical product) per liter per hour (g (chemical product)/L-hr), may be greater than 0.25 g polyketide (or other chemical product)/L-hr, may be greater than 0.50 g polyketide (or other chemical product)/L-hr, may be greater than 1.0 g polyketide (or other chemical product)/L-hr, may be greater than 1.50 g polyketide (or other chemical product)/L-hr, may be greater than 2.0 g polyketide (or other chemical product)/L-hr, may be greater than 2.50 g polyketide (or other chemical product)/L-hr, may be greater than 3.0 g polyketide (or other chemical product)/L-hr, may be greater than 3.50 g polyketide (or other chemical product)/L-hr, may be greater than 4.0 g polyketide (or other chemical product)/L-hr, may be greater than 4.50 g polyketide (or other chemical product)/L-hr, may be greater than 5.0 g polyketide (or other chemical product)/L-hr, may be greater than 5.50 g polyketide (or other chemical product)/L-hr, may be greater than 6.0 g polyketide (or other chemical product)/L-hr, may be greater than 6.50 g polyketide (or other chemical product)/L-hr, may be greater than 7.0 g polyketide (or other chemical product)/L-hr, may be greater than 7.50 g polyketide (or other chemical product)/L-hr, may be greater than 8.0 g polyketide (or other chemical product)/L-hr, may be greater than 8.50 g polyketide (or other chemical product)/L-hr, may be greater than 9.0 g polyketide (or other chemical product)/L-hr, may be greater than 9.50 g polyketide (or other chemical product)/L-hr, or may be greater than 10.0 g polyketide (or other chemical product)/L-hr.

[0021] The claims herein provided are directed to particular aspects, features, and combinations described in the specification, including the figures and tables. However, the specification also discloses various teachings related to production of 3-hydroxypropionic acid (3-HP), acrylic acid and other chemicals made there from, as well as acrylic acid based consumer products. The following paragraphs largely, but not exclusively, are directed to the latter.

[0022] The microorganism of the invention may be genetically modified for increased enzymatic activity in the organism's malonyl-CoA reductase (mcr) pathway by introduction of a heterologous nucleic acid sequence coding for a polypeptide having mono-functional or bi-functional malonyl-CoA reductase activity. In various embodiments, the malonyl-CoA reductase is NADPH-independent.

[0023] In various embodiments, 3-hydroxypropionic acid is produced according to the invention at a specific productivity of greater than 0.05 grams per gram of microorganism cell on a dry weight basis per hour or at a volumetric productivity of greater than 0.05 grams per liter per hour.

[0024] Included within the invention are embodiments where the cell culture comprises a genetically modified microorganism. The genetically modified microorganism can be modified for a trait selected from reduced enzymatic activity in the organism's fatty acid synthase pathway, increased enzymatic activity in the organism's malonyl-CoA reductase pathway, increased tolerance to 3-hydroxypropionic acid, increased enzymatic activity in the organism's NADPH-dependent transhydrogenase pathway, increased intracellular bicarbonate levels, increased enzymatic activity in the organism's acetyl-CoA carboxylase pathway, and combinations thereof. For example, the genetically modified microorganism can be modified for reduced enzymatic activity in the organism's fatty acid synthase pathway. Alternatively, the reduced enzymatic activity is a reduction in enzymatic activity in an enzyme selected from the group consisting of beta-ketoacyl-ACP reductase, 3-hydroxyacyl-CoA dehydratase, enoyl-ACP reductase, and thioesterase. In various aspects, the reduced enzymatic activity in the organism's fatty acid synthase pathway occurs via introduction of a heterologous nucleic acid sequence coding for an inducible promoter operably linked to a sequence coding for a enzyme in the fatty acid synthase pathway or homolog thereof, or a heterologous nucleic acid sequence coding for an enzyme in the fatty acid synthase pathway or homolog thereof with reduced activity. In various aspects, the enzyme in the fatty acid synthase pathway or homolog thereof is a polypeptide with temperature-sensitive beta-ketoacyl-ACP or temperature-sensitive enoyl-ACP reductase activity. Variously, the genetically modified microorganism is modified for increased enzymatic activity in the organism's malonyl-CoA reductase pathway.

[0025] In certain embodiments, the increase in enzymatic activity in the malonyl-CoA reductase (mcr) pathway occurs by introduction of a heterologous nucleic acid sequence coding for a polypeptide having bi-functional malonyl-CoA reductase enzymatic activity or mono-functional malonyl-CoA reductase activity. The heterologous nucleic acid sequence may be selected from a sequence having at least 70% identity with a sequence selected from SEQ ID NO. 783-791.

[0026] In various embodiments, the genetically modified microorganism is modified for increased tolerance to 3-hydroxypropionic acid. The increase in tolerance to 3-hydroxypropionic acid may occur in one or more components of the 3-HP toleragenic complex (3HPTGC) complex, or wherein said increase in tolerance to 3-hydroxypropionic acid results from providing at least one genetic modification of each of Group A and Group B of the 3HPTGC. The one or more components may be selected from CynS, CynT, AroG, SpeD, SpeE, SpeF, ThrA, Asd, CysM, IroK, IlvA, and homologs thereof. In various embodiments, the modification is a disruption of one or more 3HPTGC repressor genes. The repressor genes may be selected from tyrR, trpR, metJ, purR, lysR, nrdR, and homologs thereof.

[0027] Increased enzymatic activity in the organism's NADPH-dependent transhydrogenase pathway may occur by introduction of a heterologous nucleic acid sequence coding for a polypeptide having at least 70% identity with a sequence selected from SEQ ID NO. 780 or 782. In various embodiments, the increased intracellular bicarbonate levels occur by introduction of a heterologous nucleic acid sequence coding for a polypeptide having cyanase and/or carbonic anhydrase activity. Heterologous nucleic acid sequence may be selected from a sequence having at least 70% identity with a sequence selected from SEQ ID NO. 337.

[0028] In various embodiments, an increased enzymatic activity in the organism's acetyl-CoA carboxylase pathway occurs by introduction of a heterologous nucleic acid sequence coding for a polypeptide having at least 70% identity with a sequence selected from SEQ ID NO. 772, 774, 776 and 778.

[0029] The genetically modified bacteria may be further modified to decrease activity of, lactate dehydrogenase, phosphate acetyltransferase, pyruvate oxidase, or pyruvate-formate lyase, and combinations thereof.

[0030] The method according to the invention may further comprise separating and/or purifying 3-hydroxypropionic acid from said cell culture by extraction of 3-hydroxypropionic acid from said culture in the presence of a tertiary amine. Variously, 3-hydroxypropionic acid is produced at a specific productivity of greater than 0.05 grams per gram of microorganism cell on a dry weight basis per hour or at a volumetric productivity of greater than 0.50 grams per liter per hour.

[0031] The method of the invention may include production of a consumer product, such as diapers, carpet, paint, adhesives, and acrylic glass. The invention includes biologically-produced 3-hydroxypropionic acid, where the 3-hydroxypropionic acid is produced according to the method of the invention. Such 3-hydroxypropionic acid may be essentially free of chemical catalyst, including a molybdenum and/or vanadium based catalyst. The 3-hydroxypropionic acid is produced according to the method of the invention may have a ratio of carbon-14 to carbon-12 of about 1.0×10⁻¹⁴ or greater. In various aspects, the 3-hydroxypropionic acid contains less than about 10% carbon derived from petroleum. In addition, 3-hydroxypropionic acid according to the invention may contain a residual amount of organic material related to its method of production. In various embodiments, the 3-hydroxypropionic acid contains a residual amount of organic material in an amount between 1 and 1,000 parts per million of the 3-hydroxypropionic acid.

[0032] Within the scope of the invention are genetically modified microorganism, wherein the microorganism is capable of producing 3-hydroxypropionate at a specific rate selected from the rates of greater than 0.05 g/gDCW-hr, 0.08 g/gDCW-hr, greater than 0.1 g/gDCW-hr, greater than 0.13 g/gDCW-hr, greater than 0.15 g/gDCW-hr, greater than 0.175 g/gDCW-hr, greater than 0.2 g/gDCW-hr, greater than 0.25 g/gDCW-hr, greater than 0.3 g/gDCW-hr, greater than 0.35 g/gDCW-hr, greater than 0.4 g/gDCW-hr, greater than 0.45 g/gDCW-hr, or greater than 0.5 g/gDCW-hr.

[0033] The genetically modified microorganism may comprise genetic modifications to increase malonyl-coA reductase activity and acetyl-coA carboxylase activity, and genetic modifications to reduce enoyl-ACP reductase activity, lactate dehydrogenase activity and acetate kinase activity. Variously, the microorganism comprises genetic modifications to increase malonyl-coA reductase activity and acetyl-coA carboxylase activity, and genetic modifications to reduce enoyl-ACP reductase activity, lactate dehydrogenase activity and acetylphosphate transferase activity. In addition, the microorganism may comprise genetic modifications to increase malonyl-coA reductase activity and acetyl-coA carboxylase activity, and genetic modifications to reduce enoyl-ACP reductase activity, lactate dehydrogenase activity, acetate kinase activity and acetylphosphate transferase activity. In various aspects, the microorganism comprises genetic modifications to increase malonyl-coA reductase activity and acetyl-coA carboxylase activity, and genetic modifications to reduce enoyl-ACP reductase activity, lactate dehydrogenase activity and pyruvate formate lyase activity. In various embodiments, the microorganism comprises genetic modifications to increase malonyl-coA reductase activity and acetyl-coA carboxylase activity, and genetic modifications to reduce enoyl-ACP reductase activity, lactate dehydrogenase activity and pyruvate oxidase activity. Also included are microorganisms comprising genetic modifications to increase malonyl-coA reductase activity and acetyl-coA carboxylase activity, and genetic modifications to reduce enoyl-ACP reductase activity, lactate dehydrogenase activity and methylglyoxal synthase activity. In addition, microorganisms according to the invention may comprise genetic modifications to increase malonyl-coA reductase activity and acetyl-coA carboxylase activity, and genetic modifications to increase β-ketoacyl-ACP synthase activity, and decrease lactate dehydrogenase activity and methylglyoxal synthase activity, and/or the microorganism may comprise genetic modifications to increase malonyl-coA reductase activity and acetyl-coA carboxylase activity, and genetic modifications to reduce enoyl-ACP reductase activity, guanosine 3′-diphosphate 5′-triphosphate synthase activity, and guanosine 3′-diphosphate 5′-diphosphate synthase activity. Also, in some microorganisms enoyl-CoA reductase, is reduced instead of or in addition to doing such for enoyl-ACP reductase activity.

[0034] In various embodiments, a further genetic modification has been made that increases NADH/NADPH transhydrogenase activity. For example, the transhydrogenase activity may be soluble, may be membrane bound, may have a further genetic modification that has been made that increases cyanase activity, may include a further genetic modification that increases carbonic anhydrase activity, and/or may include a further genetic modification that increases pyruvate dehydrogenase activity.

[0035] In various embodiments, a further genetic modification has been made that decreases guanosine 3′-diphosphate 5′-triphosphate synthase activity, and guanosine 3′-diphosphate 5′-diphosphate synthase activity. Also included is when a genetic modification has been made that increases the NADH/NAD+ ratio in an aerated environment. Further, a genetic modification may be made that decreases β-ketoacyl-ACP synthase activity, decreases 3-hydroxypropionate reductase activity, decreases NAD+ dependant 3-hydroxypropionate dehydrogenase activity, decreases NAD+ dependant 3-hydroxypropionate dehydrogenase activity, increases tolerance to 3-hydroxypropionic acid, increases activity of any enzyme in the 3-HP toleragenic complex, increases pyruvate dehydrogenase activity, increases cyanase activity, increases carbonic anhydrase activity, increases aspartate kinase activity, increases threonine dehydratase activity, increases 2-dehydro-3-deoxyphosphoheptonate aldolase activity, increases cysteine synthase activity, increases ribose-phosphate diphosphokinase activity, increases ribonucleoside-diphosphate reductase activity, increases L-cysteine desulfhydrase activity, increases lysine decarboxylase activity, increases homocysteine transmethylase activity, increases dihydrofolate reductase activity, increases N-acetylglutamylphosphate reductase activity, increases acetylglutamate kinase activity, increases argininosuccinate lyase activity, increases acetylornithine deacetylase activity, increases chorismate mutase activity, increases prephenate dehydratase activity, increases prephenate dehydrogenase activity, increases 2-dehydro-3-deoxyphosphoheptonate aldolase activity, and/or increases D-3-phosphoglycerate dehydrogenase activity.

[0036] In various embodiments, the invention includes a culture system comprising a carbon source in an aqueous medium and a genetically modified microorganism according to any one of claims or the above-described embodiments, wherein said genetically modified organism is present in an amount selected from greater than 0.05 gDCW/L, 0.1 gDCW/L, greater than 1 gDCW/L, greater than 5 gDCW/L, greater than 10 gDCW/L, greater than 15 gDCW/L or greater than 20 gDCW/L, such as when the volume of the aqueous medium is selected from greater than 5 mL, greater than 100 mL, greater than 0.5 L, greater than 1 L, greater than 2 L, greater than 10 L, greater than 250 L, greater than 1000 L, greater than 10,000 L, greater than 50,000 L, greater than 100,000 L or greater than 200,000 L, and such as when the volume of the aqueous medium is greater than 250 L and contained within a steel vessel.

[0037] Variously, the carbon source for such culture systems is selected from dextrose, sucrose, a pentose, a polyol, a hexose, both a hexose and a pentose, and combinations thereof, the pH of the aqueous medium is less than 7.5, the culture system is aerated, such as at an oxygen transfer rate selected from i) greater than 5 mmole/L-hr of oxygen and less than 200 mmole/L-hr oxygen; ii) greater than 5 mmole/L-hr of oxygen and less than 100 mmole/L-hr oxygen; iii) greater than 5 mmole/L-hr of oxygen and less than 80 mmole/L-hr oxygen; and iv) greater than 5 mmole/L-hr of oxygen and less than 50 mmole/L-hr oxygen.

[0038] In various embodiments, the invention is an aqueous broth obtained from a culture system according to the various described embodiments, wherein said aqueous broth comprises i) a concentration of 3-hydroxypropionate selected from greater than 5 g/L, greater than 10 g/L, greater than 15 g/L, greater than 20 g/L, greater than 25 g/L, greater than 30 g/L, greater than 35 g/L, greater than 40 g/L, greater than 50 g/L, greater than 60 g/L, greater than 70 g/L, greater than 80 g/L, greater than 90 g/L, or greater than 100 g/L 3-hydroxypropionate; and ii) a concentration of 1,3-propanediol selected from less than 30 g/L; less than 20 g/L; less than 10 g/L; less than 5 g/L; less than 1 g/L; or less than 0.5 g/L. In some aspects, the aqueous broth comprises an amount of biomass selected from less than 20 gDCW/L biomass, less than 15 gDCW/L biomass, less than 10 gDCW/L biomass, less than 5 gDCW/L biomass or less than 1 gDCW/L biomass. Alternatively, the aqueous broth according to the invention is such that the 3-HP/succinate ratio (g3-HP/g succinate) is greater than 3, greater than 10 greater than 30, greater than 60, greater than 100, greater than 150 or greater than 200. In various aspects, the 3-HP/fumarate ratio (g3-HP/g fumarate) is greater than 3, greater than 10 greater than 30, greater than 60, greater than 100, greater than 150 or greater than 200, or the 3-HP/glycerol ratio (g3-HP/g glycerol) is greater than 3, greater than 10, greater than 30, greater than 60, greater than 100, greater than 150 or greater than 200, or the 3-HP/acetate ratio (g3-HP/g acetate) is greater than 1.5, greater than 3, greater than 10, greater than 30, greater than 60, greater than 100, greater than 150 or greater than 200, or the 3-HP/alanine ratio (g3-HP/g alanine) is greater than 3, greater than 10, greater than 30, greater than 60, greater than 100, greater than 150 or greater than 200, or the 3-HP/beta-alanine ratio (g3-HP/g beta-alanine) is greater than 1.5, greater than 3, greater than 10, greater than 30, greater than 60, greater than 100, greater than 150 or greater than 200, or the 3-HP/glutamate ratio (g3-HP/g glutamate) is greater than 3, greater than 10, greater than 30, greater than 60, greater than 100, greater than 150 or greater than 200, or the 3-HP/glutamine ratio (g3-HP/g glutamine) is greater than 3, greater than 10, greater than 30, greater than 60, greater than 100, greater than 150 or greater than 200, or the 3-HP/3-hydroxypropionaldehyde ratio (g3-HP/g 3-hydroxypropioaldehyde) is greater than 1.5, greater than 3, greater than 10, greater than 30, greater than 60, greater than 100, greater than 150 or greater than 200, or the 3-HP/1,3-propanediol ratio (g3-HP/g 1,3-propanediol) is greater than 1.5, greater than 3, greater than 10, greater than 30, greater than 60, greater than 100, greater than 150 or greater than 200, and/or the 3-HP/lactate ratio (g3-HP/g lactate) is greater than 3, greater than 10, greater than 30, greater than 60, greater than 100, greater than 150 or greater than 200.

### BRIEF DESCRIPTION OF THE DRAWINGS

[0039] The novel features of the invention are set forth with particularity in the claims. A better understanding of the features and advantages of the present invention will be obtained by reference to the following detailed description that sets forth illustrative embodiments, in which the principles of the invention are utilized, and the accompanying drawings of which:

[0040] FIG. 1 depicts metabolic pathways of a microorganism related to aspects of the present invention, more particularly related to 3-HP production, with gene names of E. coli shown at certain enzymatic steps, the latter for example and not meant to be limiting.

[0041] FIG. 2A depicts metabolic pathways of a microorganism related to aspects of the present invention, with gene names of E. coli shown at certain enzymatic steps, the latter for example and not meant to be limiting.

[0042] FIG. 2B provides a more detailed depiction of representative enzymatic conversions and exemplary E. coli genes of the fatty acid synthetase system that was more generally depicted in FIG. 2A.

[0043] FIG. 3 provides an exemplary multiple sequence alignment, comparing carbonic anhydrase polypeptides (CLUSTAL 2.0.12 multiple sequence alignment of Carbonic Anhydrase Polypeptides).

[0044] FIG. 4A provides an exemplary sequence alignment: Comparison of DNA sequences of fabIts (JP1111 (SEQ ID No.:769)) and wildtype (BW25113 (SEQ ID No.:827)) E. coli fabI genes DNA mutation: C722T.

[0045] FIG. 4B provides an exemplary sequence alignment: Comparison of protein sequences of fabI^{ts} (JP1111 (SEQ ID No.:770) and wildtype (BW25113 (SEQ ID No.:828)) E. coli fabI genes Amino Acid-S241F.

[0046] FIGS. 5, 6 and 7 provide data and results from Example 11.

[0047] FIG. 8 depicts metabolic pathways of a microorganism with multiple genetic modifications related to aspects of the present invention, more particularly related to 3-HP production, with gene names of E. coli shown at certain enzymatic steps, the latter for example and not meant to be limiting. Various combinations of these genetic modifications may be provided and utilized for embodiments that produce chemical products other than 3-HP.

[0048] FIG. 9A, sheets 1-7 is a multi-sheet depiction of portions of metabolic pathways, showing pathway products and enzymes, that together comprise the 3-HP toleragenic complex (3HPTGC) in E. coli. Sheet 1 provides a general schematic depiction of the arrangement of the remaining sheets.

[0049] FIG. 9B, sheets 1-7, provides a multi-sheet depiction of the 3HPTGC for Bacillus subtilis. Sheet 1 provides a general schematic depiction of the arrangement of the remaining sheets.

[0050] FIG. 9C, sheets 1-7, provides a multi-sheet depiction of the 3HPTGC for Saccharomyces cerevisiae. Sheet 1 provides a general schematic depiction of the arrangement of the remaining sheets.

[0051] FIG. 9D, sheets 1-7, provides a multi-sheet depiction of the 3HPTGC for Cupriavidus necator (previously, Ralstonia eutropha). Sheet 1 provides a general schematic depiction of the arrangement of the remaining sheets.

[0052] FIG. 10 provides a representation of the glycine cleavage pathway.

[0053] FIG. 11 provides, from a prior art reference, a summary of a known 3-HP production pathway from glucose to pyruvate to acetyl-CoA to malonyl-CoA to 3-HP.

[0054] FIG. 12 provides, from a prior art reference, a summary of a known 3-HP production pathway from glucose to phosphoenolpyruvate (PEP) to oxaloacetate (directly or via pyruvate) to aspartate to β-alanine to malonate semialdehyde to 3-HP.

[0055] FIG. 13 provides, from a prior art reference, a summary of known 3-HP production pathways.

[0056] FIGS. 14A and B provide a schematic diagram of natural mixed fermentation pathways in E. coli.

[0057] FIG. 15A-O provides graphic data of control microorganisms responses to 3-HP, and FIG. 15P provides a comparison with one genetic modification of the 3HPTGC.

[0058] FIG. 16A depicts a known chemical reaction catalyzed by alpha-ketoglutarate encoded by the kgd gene from M. tuberculosis, and FIG. 16B depicts a new enzymatic function, the decarboxylation of oxaloacetate to malonate semialdehyde that is to be achieved by modification of the kgd gene.

[0059] FIG. 17 summarizes the biochemical basis for a proposed selection approach.

[0060] FIG. 18 shows a proposed selection approach for kgd mutants.

[0061] FIG. 19A-C shows a screening protocol related to the proposed selection approach depicted in FIG. 18.

[0062] FIG. 20 provides a comparison regarding the IroK peptide sequence.

[0063] FIG. 21 provides a calibration curve for 3-HP conducted with HPLC.

[0064] FIG. 22 provides a calibration curve for 3-HP conducted for GC/MS.

[0065] FIG. 23 provides a representative standard curve for the enzymatic assay for 3-HP.

[0066] FIG. 24 A, B, and C and FIG. 25 A and B show a schematic of the entire process of converting biomass to a finished product such as a diaper.

[0067] Tables also are provided herein and are part of the specification.

### DETAILED DESCRIPTION OF THE INVENTION

[0068] The present invention is related to various production methods and/or genetically modified microorganisms that have utility for fermentative production of various chemical products, to methods of making such chemical products that utilize populations of these microorganisms in vessels, and to systems for chemical production that employ these microorganisms and methods. Among the benefits of the present invention is increased specific productivity when such microorganisms produce a chemical product during a fermentation event or cycle. The present invention provides production techniques and/or genetically modified microorganisms to produce a chemical product of interest, such as a polyketide with one or more means for modulating conversion of malonyl-CoA to fatty acyl molecules (which thereafter may be converted to fatty acids, for example fatty acyl-ACP molecules), wherein the production pathway comprises an enzymatic conversion step that uses malonyl-CoA as a substrate. The means for modulating conversion of malonyl-CoA to fatty acyl molecules, such as fatty acyl-ACP molecules, is effective to balance carbon flow to microbial biomass with carbon flow to chemical product, and surprisingly affords achievement of elevated specific productivity rates.

[0069] As described in another patent application with a common inventor, one chemical product may be 3-hydroxypropionic acid (CAS No. 503-66-2, “3-HP”). The production of 3-HP may be used herein to demonstrate the features of the invention as they may be applied to other chemical products.

[0070] As to particular polyketide chemical products, these include but are not limited to: tetracycline; erythromycin; avermectin; vanomycin-related antibiotics; and generally Type II polyketides. Another group of chemical products that may be made by the invention are macrolides.

[0071] Other particular polyketide chemical products include 1,3,6,8-tetrahydroxynaphthalene (THN) or its derivative flaviolin (CAS No. 479-05-0). Other polyketides, and other chemical products include those in Tables 1B and 1C.

[0072] Any of these may be described herein as a selected chemical product, or a chemical product of interest. Also, any grouping, including any sub-group, of the above listing may be considered what is referred to by “selected chemical product,” “chemical product of interest,” and the like. For any of these chemical products a microorganism may inherently comprise a biosynthesis pathway to such chemical product and/or may require addition of one or more heterologous nucleic acid sequences to provide or complete such a biosynthesis pathway, in order to achieve a desired production of such chemical product.

[0073] As noted herein, various aspects of the present invention are directed to a microorganism cell that comprises a metabolic pathway from malonyl-CoA to a chemical product of interest, such as those described above, and means for modulating conversion of malonyl-CoA to fatty acyl molecules (which thereafter may be converted to fatty acids) also are provided. Then, when the means for modulating modulate to decrease such conversion, a proportionally greater number of malonyl-CoA molecules are 1) produced and/or 2) converted via the metabolic pathway from malonyl-CoA to the chemical product. In various embodiments, additional genetic modifications may be made, such as to 1) increase intracellular bicarbonate levels, such as by increasing carbonic anhydrase, 2) increase enzymatic activity of acetyl-CoA carboxylase, and NADPH-dependent transhydrogenase.

[0074] Unexpected increases in specific productivity by a population of a genetically modified microorganism may be achieved in methods and systems in which that microorganism has a microbial production pathway from malonyl-CoA to a selected chemical product as well as a reduction in the enzymatic activity of a selected enzyme of the microorganism's fatty acid synthase system (more particularly, its fatty acid elongation enzymes). In various embodiments, specific supplements to a bioreactor vessel comprising such microorganism population may also be provided to further improve the methods and systems.

[0075] Other additional genetic modifications are disclosed herein for various embodiments.

[0076] Also as noted herein, various aspects of the present invention are directed to a microorganism cell comprises a metabolic pathway from malonyl-CoA to 3-HP, and means for modulating conversion of malonyl-CoA to fatty acyl molecules (which thereafter may be converted to fatty acids) also are provided. Then, when the means for modulating modulate to decrease such conversion, a proportionally greater number of malonyl-CoA molecules are 1) produced and/or 2) converted via the metabolic pathway from malonyl-CoA to 3-HP. In various embodiments, additional genetic modifications may be made, such as to 1) increase intracellular bicarbonate levels, such as by increasing carbonic anhydrase, 2) increase enzymatic activity of acetyl-CoA carboxylase, and NADPH-dependent transhydrogenase.

[0077] Additionally, for one chemical product, 3-hydroxypropionic acid (3-HP), genetic modifications for production pathways are provided, and a toleragenic complex is described for which genetic modifications, and/or culture system modifications, may be made to increase microorganism tolerance to 3-HP. Moreover, genetic modifications to increase expression and/or enzymatic activity of carbonic anhydrase and/or cyanase may provide dual-functions to advantageously improve both 3-HP production and 3-HP tolerance.

### DEFINITIONS

[0078] As used in the specification and the claims, the singular forms “a,” “an,” and “the” include plural referents unless the context clearly dictates otherwise. Thus, for example, reference to an “expression vector” includes a single expression vector as well as a plurality of expression vectors, either the same (e.g., the same operon) or different; reference to “microorganism” includes a single microorganism as well as a plurality of microorganisms; and the like.

[0079] As used herein, dry cell weight (DCW) for E. coli strains is calculated as 0.33 times the measured OD₆₀₀ value, based on baseline DCW to OD₆₀₀ determinations.

[0080] As used herein, “reduced enzymatic activity,” “reducing enzymatic activity,” and the like is meant to indicate that a microorganism cell's, or an isolated enzyme, exhibits a lower level of activity than that measured in a comparable cell of the same species or its native enzyme. That is, enzymatic conversion of the indicated substrate(s) to indicated product(s) under known standard conditions for that enzyme is at least 10, at least 20, at least 30, at least 40, at least 50, at least 60, at least 70, at least 80, or at least 90 percent less than the enzymatic activity for the same biochemical conversion by a native (non-modified) enzyme under a standard specified condition. This term also can include elimination of that enzymatic activity. A cell having reduced enzymatic activity of an enzyme can be identified using any method known in the art. For example, enzyme activity assays can be used to identify cells having reduced enzyme activity. See, for example, Enzyme Nomenclature, Academic Press, Inc., New York 2007.

[0081] The term “heterologous DNA,” “heterologous nucleic acid sequence,” and the like as used herein refers to a nucleic acid sequence wherein at least one of the following is true: (a) the sequence of nucleic acids is foreign to (i.e., not naturally found in) a given host microorganism; (b) the sequence may be naturally found in a given host microorganism, but in an unnatural (e.g., greater than expected) amount; or (c) the sequence of nucleic acids comprises two or more subsequences that are not found in the same relationship to each other in nature. For example, regarding instance (c), a heterologous nucleic acid sequence that is recombinantly produced will have two or more sequences from unrelated genes arranged to make a new functional nucleic acid.

[0082] The term “heterologous” is intended to include the term “exogenous” as the latter term is generally used in the art. With reference to the host microorganism's genome prior to the introduction of a heterologous nucleic acid sequence, the nucleic acid sequence that codes for the enzyme is heterologous (whether or not the heterologous nucleic acid sequence is introduced into that genome).

[0083] As used herein, the term “gene disruption,” or grammatical equivalents thereof (and including “to disrupt enzymatic function,” “disruption of enzymatic function,” and the like), is intended to mean a genetic modification to a microorganism that renders the encoded gene product as having a reduced polypeptide activity compared with polypeptide activity in or from a microorganism cell not so modified. The genetic modification can be, for example, deletion of the entire gene, deletion or other modification of a regulatory sequence required for transcription or translation, deletion of a portion of the gene which results in a truncated gene product (e.g., enzyme) or by any of various mutation strategies that reduces activity (including to no detectable activity level) the encoded gene product. A disruption may broadly include a deletion of all or part of the nucleic acid sequence encoding the enzyme, and also includes, but is not limited to other types of genetic modifications, e.g., introduction of stop codons, frame shift mutations, introduction or removal of portions of the gene, and introduction of a degradation signal, those genetic modifications affecting mRNA transcription levels and/or stability, and altering the promoter or repressor upstream of the gene encoding the enzyme.

[0084] In various contexts, a gene disruption is taken to mean any genetic modification to the DNA, mRNA encoded from the DNA, and the corresponding amino acid sequence that results in reduced polypeptide activity. Many different methods can be used to make a cell having reduced polypeptide activity. For example, a cell can be engineered to have a disrupted regulatory sequence or polypeptide-encoding sequence using common mutagenesis or knock-out technology. See, e.g., Methods in Yeast Genetics (1997 edition), Adams et al., Cold Spring Harbor Press (1998). One particularly useful method of gene disruption is complete gene deletion because it reduces or eliminates the occurrence of genetic reversions in the genetically modified microorganisms of the invention. Accordingly, a disruption of a gene whose product is an enzyme thereby disrupts enzymatic function. Alternatively, antisense technology can be used to reduce the activity of a particular polypeptide. For example, a cell can be engineered to contain a cDNA that encodes an antisense molecule that prevents a polypeptide from being translated. Further, gene silencing can be used to reduce the activity of a particular polypeptide.

[0085] The term “antisense molecule” as used herein encompasses any nucleic acid molecule or nucleic acid analog (e.g., peptide nucleic acids) that contains a sequence that corresponds to the coding strand of an endogenous polypeptide. An antisense molecule also can have flanking sequences (e.g., regulatory sequences). Thus, antisense molecules can be ribozymes or antisense oligonucleotides.

[0086] As used herein, a ribozyme can have any general structure including, without limitation, hairpin, hammerhead, or axhead structures, provided the molecule cleaves RNA.

[0087] The term “reduction” or “to reduce” when used in such phrase and its grammatical equivalents are intended to encompass a complete elimination of such conversion(s).

[0088] Bio-production, as used herein, may be aerobic, microaerobic, or anaerobic.

[0089] As used herein, the language “sufficiently homologous” refers to proteins or portions thereof that have amino acid sequences that include a minimum number of identical or equivalent amino acid residues when compared to an amino acid sequence of the amino acid sequences provided in this application (including the SEQ ID Nos./sequence listings) such that the protein or portion thereof is able to achieve the respective enzymatic reaction and/or other function. To determine whether a particular protein or portion thereof is sufficiently homologous may be determined by an assay of enzymatic activity, such as those commonly known in the art.

[0090] Descriptions and methods for sequence identity and homology are intended to be exemplary and it is recognized that these concepts are well-understood in the art. Further, it is appreciated that nucleic acid sequences may be varied and still encode an enzyme or other polypeptide exhibiting a desired functionality, and such variations are within the scope of the present invention. Also, it is intended that the phrase “equivalents thereof” is mean to indicate functional equivalents of a referred to gene, enzyme or the like. Such an equivalent may be for the same species or another species, such as another microorganism species.

[0091] Further to nucleic acid sequences, “hybridization” refers to the process in which two single-stranded polynucleotides bind non-covalently to form a stable double-stranded polynucleotide. The term “hybridization” may also refer to triple-stranded hybridization. The resulting (usually) double-stranded polynucleotide is a “hybrid” or “duplex.” “Hybridization conditions” will typically include salt concentrations of less than about 1M, more usually less than about 500 mM and less than about 200 mM. Hybridization temperatures can be as low as 5° C., but are typically greater than 22° C., more typically greater than about 30° C., and often are in excess of about 37° C. Hybridizations are usually performed under stringent conditions, i.e. conditions under which a probe will hybridize to its target subsequence. Stringent conditions are sequence-dependent and are different in different circumstances. Longer fragments may require higher hybridization temperatures for specific hybridization. As other factors may affect the stringency of hybridization, including base composition and length of the complementary strands, presence of organic solvents and extent of base mismatching, the combination of parameters is more important than the absolute measure of any one alone. Generally, stringent conditions are selected to be about 5° C. lower than the Tₘ for the specific sequence at a defined ionic strength and pH. Exemplary stringent conditions include salt concentration of at least 0.01 M to no more than 1 M Na ion concentration (or other salts) at a pH 7.0 to 8.3 and a temperature of at least 25° C. For example, conditions of 5×SSPE (750 mM NaCl, 50 mM NaPhosphate, 5 mM EDTA, pH 7.4) and a temperature of 25-30° C. are suitable for allele-specific probe hybridizations. For stringent conditions, see for example, Sambrook and Russell and Anderson “Nucleic Acid Hybridization” 1^{st} Ed., BIOS Scientific Publishers Limited (1999), which are hereby incorporated by reference for hybridization protocols. “Hybridizing specifically to” or “specifically hybridizing to” or like expressions refer to the binding, duplexing, or hybridizing of a molecule substantially to or only to a particular nucleotide sequence or sequences under stringent conditions when that sequence is present in a complex mixture (e.g., total cellular) DNA or RNA.

[0092] The term “identified enzymatic functional variant” means a polypeptide that is determined to possess an enzymatic activity and specificity of an enzyme of interest but which has an amino acid sequence different from such enzyme of interest. A corresponding “variant nucleic acid sequence” may be constructed that is determined to encode such an identified enzymatic functional variant. For a particular purpose, such as increased tolerance to 3-HP via genetic modification to increase enzymatic conversion at one or more of the enzymatic conversion steps of the 3HPTGC in a microorganism, one or more genetic modifications may be made to provide one or more heterologous nucleic acid sequence(s) that encode one or more identified 3HPTGC enzymatic functional variant(s). That is, each such nucleic acid sequence encodes a polypeptide that is not exactly the known polypeptide of an enzyme of the 3HPTGC, but which nonetheless is shown to exhibit enzymatic activity of such enzyme. Such nucleic acid sequence, and the polypeptide it encodes, may not fall within a specified limit of homology or identity yet by its provision in a cell nonetheless provide for a desired enzymatic activity and specificity. The ability to obtain such variant nucleic acid sequences and identified enzymatic functional variants is supported by recent advances in the states of the art in bioinformatics and protein engineering and design, including advances in computational, predictive and high-throughput methodologies. Functional variants more generally include enzymatic functional variants, and the nucleic acids sequences that encode them, as well as variants of non-enzymatic polypeptides, wherein the variant exhibits the function of the original (target) sequence.

[0093] The use of the phrase “segment of interest” is meant to include both a gene and any other nucleic acid sequence segment of interest. One example of a method used to obtain a segment of interest is to acquire a culture of a microorganism, where that microorganism's genome includes the gene or nucleic acid sequence segment of interest.

[0094] When the genetic modification of a gene product, i.e., an enzyme, is referred to herein, including the claims, it is understood that the genetic modification is of a nucleic acid sequence, such as or including the gene, that normally encodes the stated gene product, i.e., the enzyme.

[0095] In some embodiments a truncated respective polypeptide has at least about 90% of the full length of a polypeptide encoded by a nucleic acid sequence encoding the respective native enzyme, and more particularly at least 95% of the full length of a polypeptide encoded by a nucleic acid sequence encoding the respective native enzyme. By a polypeptide having an amino acid sequence at least, for example, 95% “identical” to a reference amino acid sequence of a polypeptide is intended that the amino acid sequence of the claimed polypeptide is identical to the reference sequence except that the claimed polypeptide sequence can include up to five amino acid alterations per each 100 amino acids of the reference amino acid of the polypeptide. In other words, to obtain a polypeptide having an amino acid sequence at least 95% identical to a reference amino acid sequence, up to 5% of the amino acid residues in the reference sequence can be deleted or substituted with another amino acid, or a number of amino acids up to 5% of the total amino acid residues in the reference sequence can be inserted into the reference sequence. These alterations of the reference sequence can occur at the amino or carboxy terminal positions of the reference amino acid sequence or anywhere between those terminal positions, interspersed either individually among residues in the reference sequence or in one or more contiguous groups within the reference sequence. In other embodiments truncation may be more substantial, as described elsewhere herein.

[0096] Species and other phylogenic identifications are according to the classification known to a person skilled in the art of microbiology.

[0097] Where methods and steps described herein indicate certain events occurring in certain order, those of ordinary skill in the art will recognize that the ordering of certain steps may be modified and that such modifications are in accordance with the variations of the invention. Additionally, certain steps may be performed concurrently in a parallel process when possible, as well as performed sequentially.

[0098] Prophetic examples provided herein are meant to be broadly exemplary and not limiting in any way. This applies to the examples regarding separation and purification of 3-HP, and conversions of 3-HP to downstream compounds, since there are numerous possible approaches to such steps and conversions, including those disclosed in references recited and incorporated herein.

[0099] The meaning of abbreviations is as follows: “C” means Celsius or degrees Celsius, as is clear from its usage, DCW means dry cell weight, “s” means second(s), “min” means minute(s), “h,” “hr,” or “hrs” means hour(s), “psi” means pounds per square inch, “nm” means nanometers, “d” means day(s), “μL” or “uL” or “ul” means microliter(s), “mL” means milliliter(s), “L” means liter(s), “mm” means millimeter(s), “nm” means nanometers, “mM” means millimolar, “μM” or “uM” means micromolar, “M” means molar, “mmol” means millimole(s), “μmol” or “uMol” means micromole(s)”, “g” means gram(s), “μg” or “ug” means microgram(s) and “ng” means nanogram(s), “PCRn” means polymerase chain reaction, “OD” means optical density, “OD₆₀₀” means the optical density measured at a photon wavelength of 600 nm, “kDa” means kilodaltons, “g” means the gravitation constant, “bp” means base pair(s), “kbp” means kilobase pair(s), “% w/v” means weight/volume percent, “% v/v” means volume/volume percent, “IPTG” means isopropyl-μ-D-thiogalactopyranoiside, “RBS” means ribosome binding site, “rpm” means revolutions per minute, “HPLC” means high performance liquid chromatography, and “GC” means gas chromatography. As disclosed herein, “3-HP” means 3-hydroxypropionic acid and “3HPTGC” means the 3-HP toleragenic complex. Also, 10̂5 and the like are taken to mean 10⁵ and the like.

[0100] I. Carbon Sources

[0101] Bio-production media, which is used in the present invention with recombinant microorganisms having a biosynthetic pathway for 3-HP, must contain suitable carbon sources or substrates for the intended metabolic pathways. Suitable substrates may include, but are not limited to, monosaccharides such as glucose and fructose, oligosaccharides such as lactose or sucrose, polysaccharides such as starch or cellulose or mixtures thereof and unpurified mixtures from renewable feedstocks such as cheese whey permeate, cornsteep liquor, sugar beet molasses, and barley malt. Additionally the carbon substrate may also be one-carbon substrates such as carbon dioxide, carbon monoxide, or methanol for which metabolic conversion into key biochemical intermediates has been demonstrated. In addition to one and two carbon substrates methylotrophic organisms are also known to utilize a number of other carbon containing compounds such as methylamine, glucosamine and a variety of amino acids for metabolic activity.

[0102] Although it is contemplated that all of the above mentioned carbon substrates and mixtures thereof are suitable in the present invention as a carbon source, common carbon substrates used as carbon sources are glucose, fructose, and sucrose, as well as mixtures of any of these sugars. Other suitable substrates include xylose, arabinose, other cellulose-based C-5 sugars, high-fructose corn syrup, and various other sugars and sugar mixtures as are available commercially. Sucrose may be obtained from feedstocks such as sugar cane, sugar beets, cassava, bananas or other fruit, and sweet sorghum. Glucose and dextrose may be obtained through saccharification of starch based feedstocks including grains such as corn, wheat, rye, barley, and oats. Also, in some embodiments all or a portion of the carbon source may be glycerol. Alternatively, glycerol may be excluded as an added carbon source.

[0103] In one embodiment, the carbon source is selected from glucose, fructose, sucrose, dextrose, lactose, glycerol, and mixtures thereof. Variously, the amount of these components in the carbon source may be greater than about 50%, greater than about 60%, greater than about 70%, greater than about 80%, greater than about 90%, or more, up to 100% or essentially 100% of the carbon source.

[0104] In addition, methylotrophic organisms are known to utilize a number of other carbon containing compounds such as methylamine, glucosamine and a variety of amino acids for metabolic activity. For example, methylotrophic yeast are known to utilize the carbon from methylamine to form trehalose or glycerol (Hellion et al., Microb. Growth C1-Compd. (Int. Symp.), 7th (1993), 415-32. Editor(s): Murrell, J. Collin; Kelly, Don P. Publisher: Intercept, Andover, UK). Similarly, various species of Candida will metabolize alanine or oleic acid (Sulter et al., Arch. Microbiol. 153:485-489 (1990)). Hence it is contemplated that the source of carbon utilized in embodiments of the present invention may encompass a wide variety of carbon-containing substrates.

[0105] In addition, fermentable sugars may be obtained from cellulosic and lignocellulosic biomass through processes of pretreatment and saccharification, as described, for example, in U.S. Patent Publication No. 2007/0031918A1, which is herein incorporated by reference. Biomass refers to any cellulosic or lignocellulosic material and includes materials comprising cellulose, and optionally further comprising hemicellulose, lignin, starch, oligosaccharides and/or monosaccharides. Biomass may also comprise additional components, such as protein and/or lipid. Biomass may be derived from a single source, or biomass can comprise a mixture derived from more than one source; for example, biomass could comprise a mixture of corn cobs and corn stover, or a mixture of grass and leaves. Biomass includes, but is not limited to, bioenergy crops, agricultural residues, municipal solid waste, industrial solid waste, sludge from paper manufacture, yard waste, wood and forestry waste. Examples of biomass include, but are not limited to, corn grain, corn cobs, crop residues such as corn husks, corn stover, grasses, wheat, wheat straw, barley, barley straw, hay, rice straw, switchgrass, waste paper, sugar cane bagasse, sorghum, soy, components obtained from milling of grains, trees, branches, roots, leaves, wood chips, sawdust, shrubs and bushes, vegetables, fruits, flowers and animal manure. Any such biomass may be used in a bio-production method or system to provide a carbon source. Various approaches to breaking down cellulosic biomass to mixtures of more available and utilizable carbon molecules, including sugars, include: heating in the presence of concentrated or dilute acid (e.g., <1% sulfuric acid); treating with ammonia; treatment with ionic salts; enzymatic degradation; and combinations of these. These methods normally follow mechanical separation and milling, and are followed by appropriate separation processes.

[0106] In various embodiments, any of a wide range of sugars, including, but not limited to sucrose, glucose, xylose, cellulose or hemicellulose, are provided to a microorganism, such as in an industrial system comprising a reactor vessel in which a defined media (such as a minimal salts media including but not limited to M9 minimal media, potassium sulfate minimal media, yeast synthetic minimal media and many others or variations of these), an inoculum of a microorganism providing one or more of the 3-HP biosynthetic pathway alternatives, and the a carbon source may be combined. The carbon source enters the cell and is cataboliized by well-known and common metabolic pathways to yield common metabolic intermediates, including phosphoenolpyruvate (PEP). (See Molecular Biology of the Cell, 3rd Ed., B. Alberts et al. Garland Publishing, New York, 1994, pp. 42-45, 66-74, incorporated by reference for the teachings of basic metabolic catabolic pathways for sugars; Principles of Biochemistry, 3rd Ed., D. L. Nelson & M. M. Cox, Worth Publishers, New York, 2000, pp 527-658, incorporated by reference for the teachings of major metabolic pathways; and Biochemistry, 4th Ed., L. Stryer, W.H. Freeman and Co., New York, 1995, pp. 463-650, also incorporated by reference for the teachings of major metabolic pathways.)

[0107] Bio-based carbon can be distinguished from petroleum-based carbon according to a variety of methods, including without limitation ASTM D6866, or various other techniques. For example, carbon-14 and carbon-12 ratios differ in bio-based carbon sources versus petroleum-based sources, where higher carbon-14 ratios are found in bio-based carbon sources. In various embodiments, the carbon source is not petroleum-based, or is not predominantly petroleum based. In various embodiments, the carbon source is greater than about 50% non-petroleum based, greater than about 60% non-petroleum based, greater than about 70% non-petroleum based, greater than about 80% non-petroleum based, greater than about 90% non-petroleum based, or more. In various embodiments, the carbon source has a carbon-14 to carbon-12 ratio of about 1.0×10⁻¹⁴ or greater.

[0108] Various components may be excluded from the carbon source. For example, in some embodiments, acrylic acid, 1,4-butanediol, and/or glycerol are excluded or essentially excluded from the carbon source. As such, the carbon source according to some embodiments of the invention may be less than about 50% glycerol, less than about 40% glycerol, less than about 30% glycerol, less than about 20% glycerol, less than about 10% glycerol, less than about 5% glycerol, less than about 1% glycerol, or less. For example, the carbon source may be essentially glycerol-free. By essentially glycerol-free is meant that any glycerol that may be present in a residual amount does not contribute substantially to the production of the target chemical compound.

[0109] II. Microorganisms

[0110] Features as described and claimed herein may be provided in a microorganism selected from the listing herein, or another suitable microorganism, that also comprises one or more natural, introduced, or enhanced 3-HP bio-production pathways. Thus, in some embodiments the microorganism comprises an endogenous 3-HP production pathway (which may, in some such embodiments, be enhanced), whereas in other embodiments the microorganism does not comprise an endogenous 3-HP production pathway.

[0111] Varieties of these genetically modified microorganisms may comprise genetic modifications and/or other system alterations as may be described in other patent applications of one or more of the present inventor(s) and/or subject to assignment to the owner of the present patent application.

[0112] The examples describe specific modifications and evaluations to certain bacterial and yeast microorganisms. The scope of the invention is not meant to be limited to such species, but to be generally applicable to a wide range of suitable microorganisms. Generally, a microorganism used for the present invention may be selected from bacteria, cyanobacteria, filamentous fungi and yeasts.

[0113] For some embodiments, microbial hosts initially selected for 3-HP toleragenic bio-production should also utilize sugars including glucose at a high rate. Most microbes are capable of utilizing carbohydrates. However, certain environmental microbes cannot utilize carbohydrates to high efficiency, and therefore would not be suitable hosts for such embodiments that are intended for glucose or other carbohydrates as the principal added carbon source.

[0114] As the genomes of various species become known, the present invention easily may be applied to an ever-increasing range of suitable microorganisms. Further, given the relatively low cost of genetic sequencing, the genetic sequence of a species of interest may readily be determined to make application of aspects of the present invention more readily obtainable (based on the ease of application of genetic modifications to an organism having a known genomic sequence).

[0115] More particularly, based on the various criteria described herein, suitable microbial hosts for the bio-production of 3-HP that comprise tolerance aspects provided herein generally may include, but are not limited to, any gram negative organisms, more particularly a member of the family Enterobacteriaceae, such as E. coli, or Oligotropha carboxidovorans, or Pseudomononas sp.; any gram positive microorganism, for example Bacillus subtilis, Lactobaccilus sp. or Lactococcus sp.; a yeast, for example Saccharomyces cerevisiae, Pichia pastoris or Pichia stipitis; and other groups or microbial species. More particularly, suitable microbial hosts for the bio-production of 3-HP generally include, but are not limited to, members of the genera Clostridium, Zymomonas, Escherichia, Salmonella, Rhodococcus, Pseudomonas, Bacillus, Lactobacillus, Enterococcus, Alcaligenes, Klebsiella, Paenibacillus, Arthrobacter, Corynebacterium, Brevibacterium, Pichia, Candida, Hansenula and Saccharomyces. Hosts that may be particularly of interest include: Oligotropha carboxidovorans (such as strain OM5), Escherichia coli, Alcaligenes eutrophus (Cupriavidus necator), Bacillus licheniformis, Paenibacillus macerans, Rhodococcus erythropolis, Pseudomonas putida, Lactobacillus plantarum, Enterococcus faecium, Enterococcus gallinarium, Enterococcus faecalis, Bacillus subtilis and Saccharomyces cerevisiae.

[0116] More particularly, suitable microbial hosts for the bio-production of 3-HP generally include, but are not limited to, members of the genera Clostridium, Zymomonas, Escherichia, Salmonella, Rhodococcus, Pseudomonas, Bacillus, Lactobacillus, Enterococcus, Alcaligenes, Klebsiella, Paenibacillus, Arthrobacter, Corynebacterium, Brevibacterium, Pichia, Candida, Hansenula and Saccharomyces.

[0117] Hosts that may be particularly of interest include: Oligotropha carboxidovorans (such as strain OM5^{T}), Escherichia coli, Alcaligenes eutrophus (Cupriavidus necator), Bacillus licheniformis, Paenibacillus macerans, Rhodococcus erythropolis, Pseudomonas putida, Lactobacillus plantarum, Enterococcus faecium, Enterococcus gallinarium, Enterococcus faecalis, Bacillus subtilis and Saccharomyces cerevisiae. Also, any of the known strains of these species may be utilized as a starting microorganism, as may any of the following species including respective strains thereof—Cupriavidus basilensis, Cupriavidus campinensis, Cupriavidus gilardi, Cupriavidus laharsis, Cupriavidus metallidurans, Cupriavidus oxalaticus, Cupriavidus pauculus, Cupriavidus pinatubonensis, Cupriavidus respiraculi, and Cupriavidus taiwanensis.

[0118] In some embodiments, the recombinant microorganism is a gram-negative bacterium. In some embodiments, the recombinant microorganism is selected from the genera Zymomonas, Escherichia, Pseudomonas, Alcaligenes, and Klebsiella. In some embodiments, the recombinant microorganism is selected from the species Escherichia coli, Cupriavidus necator, Oligotropha carboxidovorans, and Pseudomonas putida. In some embodiments, the recombinant microorganism is an E. coli strain.

[0119] In some embodiments, the recombinant microorganism is a gram-positive bacterium. In some embodiments, the recombinant microorganism is selected from the genera Clostridium, Salmonella, Rhodococcus, Bacillus, Lactobacillus, Enterococcus, Paenibacillus, Arthrobacter, Corynebacterium, and Brevibacterium. In some embodiments, the recombinant microorganism is selected from the species Bacillus licheniformis, Paenibacillus macerans, Rhodococcus erythropolis, Lactobacillus plantarum, Enterococcus faecium, Enterococcus gallinarium, Enterococcus faecalis, and Bacillus subtilis. In particular embodiments, the recombinant microorganism is a B. subtilis strain.

[0120] In some embodiments, the recombinant microorganism is a yeast. In some embodiments, the recombinant microorganism is selected from the genera Pichia, Candida, Hansenula and Saccharomyces. In particular embodiments, the recombinant microorganism is Saccharomyces cerevisiae.

[0121] It is further appreciated, in view of the disclosure, that any of the above microorganisms may be used for production of chemical products other than 3-HP.

[0122] The ability to genetically modify the host is essential for the production of any recombinant microorganism. The mode of gene transfer technology may be by electroporation, conjugation, transduction or natural transformation. A broad range of host conjugative plasmids and drug resistance markers are available. The cloning vectors are tailored to the host organisms based on the nature of antibiotic resistance markers that can function in that host.

[0123] III. Media and Culture Conditions

[0124] In addition to an appropriate carbon source, such as selected from one of the herein-disclosed types, bio-production media must contain suitable minerals, salts, cofactors, buffers and other components, known to those skilled in the art, suitable for the growth of the cultures and promotion of the enzymatic pathway necessary for 3-HP production, or other products made under the present invention.

[0125] Another aspect of the invention regards media and culture conditions that comprise genetically modified microorganisms of the invention and optionally supplements.

[0126] Typically cells are grown at a temperature in the range of about 25° C. to about 40° C. in an appropriate medium, as well as up to 70° C. for thermophilic microorganisms. Suitable growth media in the present invention are common commercially prepared media such as Luria Bertani (LB) broth, M9 minimal media, Sabouraud Dextrose (SD) broth, Yeast medium (YM) broth, (Ymin) yeast synthetic minimal media, and minimal media as described herein, such as M9 minimal media. Other defined or synthetic growth media may also be used, and the appropriate medium for growth of the particular microorganism will be known by one skilled in the art of microbiology or bio-production science. In various embodiments a minimal media may be developed and used that does not comprise, or that has a low level of addition of various components, for example less than 10, 5, 2 or 1 g/L of a complex nitrogen source including but not limited to yeast extract, peptone, tryptone, soy flour, corn steep liquor, or casein. These minimal medias may also have limited supplementation of vitamin mixtures including biotin, vitamin B12 and derivatives of vitamin B12, thiamin, pantothenate and other vitamins. Minimal medias may also have limited simple inorganic nutrient sources containing less than 28, 17, or 2.5 mM phosphate, less than 25 or 4 mM sulfate, and less than 130 or 50 mM total nitrogen.

[0127] Bio-production media, which is used in embodiments of the present invention with genetically modified microorganisms, must contain suitable carbon substrates for the intended metabolic pathways. As described hereinbefore, suitable carbon substrates include carbon monoxide, carbon dioxide, and various monomeric and oligomeric sugars.

[0128] Suitable pH ranges for the bio-production are between pH 3.0 to pH 10.0, where pH 6.0 to pH 8.0 is a typical pH range for the initial condition. However, the actual culture conditions for a particular embodiment are not meant to be limited by these pH ranges.

[0129] Bio-productions may be performed under aerobic, microaerobic, or anaerobic conditions, with or without agitation.

[0130] The amount of 3-HP or other product(s), including a polyketide, produced in a bio-production media generally can be determined using a number of methods known in the art, for example, high performance liquid chromatography (HPLC), gas chromatography (GC), GC/Mass Spectroscopy (MS), or spectrometry.

[0131] IV. Bio-Production Reactors and Systems

[0132] Fermentation systems utilizing methods and/or compositions according to the invention are also within the scope of the invention.

[0133] Any of the recombinant microorganisms as described and/or referred to herein may be introduced into an industrial bio-production system where the microorganisms convert a carbon source into a selected chemical product, such as 3-HP or a polyketide such as described herein (including in priority document(s)), in a commercially viable operation. The bio-production system includes the introduction of such a recombinant microorganism into a bioreactor vessel, with a carbon source substrate and bio-production media suitable for growing the recombinant microorganism, and maintaining the bio-production system within a suitable temperature range (and dissolved oxygen concentration range if the reaction is aerobic or microaerobic) for a suitable time to obtain a desired conversion of a portion of the substrate molecules to 3-HP. Industrial bio-production systems and their operation are well-known to those skilled in the arts of chemical engineering and bioprocess engineering.

[0134] Bio-productions may be performed under aerobic, microaerobic, or anaerobic conditions, with or without agitation. The operation of cultures and populations of microorganisms to achieve aerobic, microaerobic and anaerobic conditions are known in the art, and dissolved oxygen levels of a liquid culture comprising a nutrient media and such microorganism populations may be monitored to maintain or confirm a desired aerobic, microaerobic or anaerobic condition. When syngas is used as a feedstock, aerobic, microaerobic, or anaerobic conditions may be utilized. When sugars are used, anaerobic, aerobic or microaerobic conditions can be implemented in various embodiments.

[0135] Any of the recombinant microorganisms as described and/or referred to herein may be introduced into an industrial bio-production system where the microorganisms convert a carbon source into 3-HP, and optionally in various embodiments also to one or more downstream compounds of 3-HP in a commercially viable operation. The bio-production system includes the introduction of such a recombinant microorganism into a bioreactor vessel, with a carbon source substrate and bio-production media suitable for growing the recombinant microorganism, and maintaining the bio-production system within a suitable temperature range (and dissolved oxygen concentration range if the reaction is aerobic or microaerobic) for a suitable time to obtain a desired conversion of a portion of the substrate molecules to 3-HP.

[0136] In various embodiments, syngas components or sugars are provided to a microorganism, such as in an industrial system comprising a reactor vessel in which a defined media (such as a minimal salts media including but not limited to M9 minimal media, potassium sulfate minimal media, yeast synthetic minimal media and many others or variations of these), an inoculum of a microorganism providing an embodiment of the biosynthetic pathway(s) taught herein, and the carbon source may be combined. The carbon source enters the cell and is catabolized by well-known and common metabolic pathways to yield common metabolic intermediates, including phosphoenolpyruvate (PEP). (See Molecular Biology of the Cell, 3^{rd} Ed., B. Alberts et al. Garland Publishing, New York, 1994, pp. 42-45, 66-74, incorporated by reference for the teachings of basic metabolic catabolic pathways for sugars; Principles of Biochemistry, 3^{rd} Ed., D. L. Nelson & M. M. Cox, Worth Publishers, New York, 2000, pp. 527-658, incorporated by reference for the teachings of major metabolic pathways; and Biochemistry, 4^{th} Ed., L. Stryer, W.H. Freeman and Co., New York, 1995, pp. 463-650, also incorporated by reference for the teachings of major metabolic pathways.).

[0137] Further to types of industrial bio-production, various embodiments of the present invention may employ a batch type of industrial bioreactor. A classical batch bioreactor system is considered “closed” meaning that the composition of the medium is established at the beginning of a respective bio-production event and not subject to artificial alterations and additions during the time period ending substantially with the end of the bio-production event. Thus, at the beginning of the bio-production event the medium is inoculated with the desired organism or organisms, and bio-production is permitted to occur without adding anything to the system. Typically, however, a “batch” type of bio-production event is batch with respect to the addition of carbon source and attempts are often made at controlling factors such as pH and oxygen concentration. In batch systems the metabolite and biomass compositions of the system change constantly up to the time the bio-production event is stopped. Within batch cultures cells moderate through a static lag phase to a high growth log phase and finally to a stationary phase where growth rate is diminished or halted. If untreated, cells in the stationary phase will eventually die. Cells in log phase generally are responsible for the bulk of production of a desired end product or intermediate.

[0138] A variation on the standard batch system is the fed-batch system. Fed-batch bio-production processes are also suitable in the present invention and comprise a typical batch system with the exception that the nutrients, including the substrate, are added in increments as the bio-production progresses. Fed-Batch systems are useful when catabolite repression is apt to inhibit the metabolism of the cells and where it is desirable to have limited amounts of substrate in the media. Measurement of the actual nutrient concentration in Fed-Batch systems may be measured directly, such as by sample analysis at different times, or estimated on the basis of the changes of measurable factors such as pH, dissolved oxygen and the partial pressure of waste gases such as CO₂. Batch and fed-batch approaches are common and well known in the art and examples may be found in Thomas D. Brock in Biotechnology: A Textbook of Industrial Microbiology, Second Edition (1989) Sinauer Associates, Inc., Sunderland, Mass., Deshpande, Mukund V., Appl. Biochem. Biotechnol., 36:227, (1992), and Biochemical Engineering Fundamentals, 2^{nd} Ed. J. E. Bailey and D. F. Ollis, McGraw Hill, New York, 1986, herein incorporated by reference for general instruction on bio-production.

[0139] Although embodiments of the present invention may be performed in batch mode, or in fed-batch mode, it is contemplated that the invention would be adaptable to continuous bio-production methods. Continuous bio-production is considered an “open” system where a defined bio-production medium is added continuously to a bioreactor and an equal amount of conditioned media is removed simultaneously for processing. Continuous bio-production generally maintains the cultures within a controlled density range where cells are primarily in log phase growth. Two types of continuous bioreactor operation include a chemostat, wherein fresh media is fed to the vessel while simultaneously removing an equal rate of the vessel contents. The limitation of this approach is that cells are lost and high cell density generally is not achievable. In fact, typically one can obtain much higher cell density with a fed-batch process. Another continuous bioreactor utilizes perfusion culture, which is similar to the chemostat approach except that the stream that is removed from the vessel is subjected to a separation technique which recycles viable cells back to the vessel. This type of continuous bioreactor operation has been shown to yield significantly higher cell densities than fed-batch and can be operated continuously. Continuous bio-production is particularly advantageous for industrial operations because it has less down time associated with draining, cleaning and preparing the equipment for the next bio-production event. Furthermore, it is typically more economical to continuously operate downstream unit operations, such as distillation, than to run them in batch mode.

[0140] Continuous bio-production allows for the modulation of one factor or any number of factors that affect cell growth or end product concentration. For example, one method will maintain a limiting nutrient such as the carbon source or nitrogen level at a fixed rate and allow all other parameters to moderate. In other systems a number of factors affecting growth can be altered continuously while the cell concentration, measured by media turbidity, is kept constant. Methods of modulating nutrients and growth factors for continuous bio-production processes as well as techniques for maximizing the rate of product formation are well known in the art of industrial microbiology and a variety of methods are detailed by Brock, supra.

[0141] It is contemplated that embodiments of the present invention may be practiced using either batch, fed-batch or continuous processes and that any known mode of bio-production would be suitable. It is contemplated that cells may be immobilized on an inert scaffold as whole cell catalysts and subjected to suitable bio-production conditions for 3-HP production, or be cultured in liquid media in a vessel, such as a culture vessel. Thus, embodiments used in such processes, and in bio-production systems using these processes, include a population of genetically modified microorganisms of the present invention, a culture system comprising such population in a media comprising nutrients for the population, and methods of making 3-HP and thereafter, a downstream product of 3-HP.

[0142] Embodiments of the invention include methods of making 3-HP in a bio-production system, some of which methods may include obtaining 3-HP after such bio-production event. For example, a method of making 3-HP may comprise: providing to a culture vessel a media comprising suitable nutrients; providing to the culture vessel an inoculum of a genetically modified microorganism comprising genetic modifications described herein such that the microorganism produces 3-HP from syngas and/or a sugar molecule; and maintaining the culture vessel under suitable conditions for the genetically modified microorganism to produce 3-HP.

[0143] It is within the scope of the present invention to produce, and to utilize in bio-production methods and systems, including industrial bio-production systems for production of 3-HP, a recombinant microorganism genetically engineered to modify one or more aspects effective to increase tolerance to 3-HP (and, in some embodiments, also 3-HP bio-production) by at least 20 percent over control microorganism lacking the one or more modifications.

[0144] In various embodiments, the invention is directed to a system for bioproduction of acrylic acid as described herein, said system comprising: a fermentation tank suitable for microorganism cell culture; a line for discharging contents from the fermentation tank to an extraction and/or separation vessel; an extraction and/or separation vessel suitable for removal of 3-hydroxypropionic acid from cell culture waste; a line for transferring 3-hydroxypropionic acid to a dehydration vessel; and a dehydration vessel suitable for conversion of 3-hydroxypropionic acid to acrylic acid. In various embodiments, the system includes one or more pre-fermentation tanks, distillation columns, centrifuge vessels, back extraction columns, mixing vessels, or combinations thereof.

[0145] Also, it is within the scope of the present invention to produce, and to utilize in bio-production methods and systems, including industrial bio-production systems for production of a selected chemical product (such as but not limited to a polyketide), a recombinant microorganism genetically engineered to modify one or more aspects effective to increase chemical product bio-production by at least 20 percent over control microorganism lacking the one or more modifications.

[0146] In various embodiments, the invention is directed to a system for bio-production of a chemical product as described herein, said system comprising: a fermentation tank suitable for microorganism cell culture; a line for discharging contents from the fermentation tank to an extraction and/or separation vessel; and an extraction and/or separation vessel suitable for removal of the chemical product from cell culture waste. In various embodiments, the system includes one or more pre-fermentation tanks, distillation columns, centrifuge vessels, back extraction columns, mixing vessels, or combinations thereof.

[0147] The following published resources are incorporated by reference herein for their respective teachings to indicate the level of skill in these relevant arts, and as needed to support a disclosure that teaches how to make and use methods of industrial bio-production of 3-HP, or other product(s) produced under the invention, from sugar sources, and also industrial systems that may be used to achieve such conversion with any of the recombinant microorganisms of the present invention (Biochemical Engineering Fundamentals, 2^{nd} Ed. J. E. Bailey and D. F. Ollis, McGraw Hill, New York, 1986, entire book for purposes indicated and Chapter 9, pages 533-657 in particular for biological reactor design; Unit Operations of Chemical Engineering, 5^{th} Ed., W. L. McCabe et al., McGraw Hill, New York 1993, entire book for purposes indicated, and particularly for process and separation technologies analyses; Equilibrium Staged Separations, P. C. Wankat, Prentice Hall, Englewood Cliffs, N.J. USA, 1988, entire book for separation technologies teachings). Generally, it is further appreciated, in view of the disclosure, that any of the above methods and systems may be used for production of chemical products other than 3-HP.

[0148] V. Genetic Modifications, Nucleotide Sequences, and Amino Acid Sequences

[0149] Embodiments of the present invention may result from introduction of an expression vector into a host microorganism, wherein the expression vector contains a nucleic acid sequence coding for an enzyme that is, or is not, normally found in a host microorganism.

[0150] The ability to genetically modify a host cell is essential for the production of any genetically modified (recombinant) microorganism. The mode of gene transfer technology may be by electroporation, conjugation, transduction, or natural transformation. A broad range of host conjugative plasmids and drug resistance markers are available. The cloning vectors are tailored to the host organisms based on the nature of antibiotic resistance markers that can function in that host. Also, as disclosed herein, a genetically modified (recombinant) microorganism may comprise modifications other than via plasmid introduction, including modifications to its genomic DNA.

[0151] It has long been recognized in the art that some amino acids in amino acid sequences can be varied without significant effect on the structure or function of proteins. Variants included can constitute deletions, insertions, inversions, repeats, and type substitutions so long as the indicated enzyme activity is not significantly adversely affected. Guidance concerning which amino acid changes are likely to be phenotypically silent can be found, inter alia, in Bowie, J. U., et al., “Deciphering the Message in Protein Sequences: Tolerance to Amino Acid Substitutions,” Science 247:1306-1310 (1990). This reference is incorporated by reference for such teachings, which are, however, also generally known to those skilled in the art.

[0152] In various embodiments polypeptides obtained by the expression of the polynucleotide molecules of the present invention may have at least approximately 50%, 60%, 70%, 80%, 90%, 95%, 96%, 97%, 98%, 99% or 100% identity to one or more amino acid sequences encoded by the genes and/or nucleic acid sequences described herein for the 3-HP tolerance-related and biosynthesis pathways.

[0153] As a practical matter, whether any particular polypeptide is at least 50%, 60%, 70%, 80%, 85%, 90%, 92%, 95%, 96%, 97%, 98% or 99% identical to any reference amino acid sequence of any polypeptide described herein (which may correspond with a particular nucleic acid sequence described herein), such particular polypeptide sequence can be determined conventionally using known computer programs such the Bestfit program (Wisconsin Sequence Analysis Package, Version 8 for Unix, Genetics Computer Group, University Research Park, 575 Science Drive, Madison, Wis. 53711). When using Bestfit or any other sequence alignment program to determine whether a particular sequence is, for instance, 95% identical to a reference sequence according to the present invention, the parameters are set such that the percentage of identity is calculated over the full length of the reference amino acid sequence and that gaps in homology of up to 5% of the total number of amino acid residues in the reference sequence are allowed.

[0154] For example, in a specific embodiment the identity between a reference sequence (query sequence, i.e., a sequence of the present invention) and a subject sequence, also referred to as a global sequence alignment, may be determined using the FASTDB computer program based on the algorithm of Brutlag et al. (Comp. App. Biosci. 6:237-245 (1990)). Preferred parameters for a particular embodiment in which identity is narrowly construed, used in a FASTDB amino acid alignment, are: Scoring Scheme=PAM (Percent Accepted Mutations) 0, k-tuple=2, Mismatch Penalty=1, Joining Penalty=20, Randomization Group Length=0, Cutoff Score=1, Window Size=sequence length, Gap Penalty=5, Gap Size Penalty=0.05, Window Size=500 or the length of the subject amino acid sequence, whichever is shorter. According to this embodiment, if the subject sequence is shorter than the query sequence due to N- or C-terminal deletions, not because of internal deletions, a manual correction is made to the results to take into consideration the fact that the FASTDB program does not account for N- and C-terminal truncations of the subject sequence when calculating global percent identity. For subject sequences truncated at the N- and C-termini, relative to the query sequence, the percent identity is corrected by calculating the number of residues of the query sequence that are lateral to the N- and C-terminal of the subject sequence, which are not matched/aligned with a corresponding subject residue, as a percent of the total bases of the query sequence. A determination of whether a residue is matched/aligned is determined by results of the FASTDB sequence alignment. This percentage is then subtracted from the percent identity, calculated by the FASTDB program using the specified parameters, to arrive at a final percent identity score. This final percent identity score is what is used for the purposes of this embodiment. Only residues to the N- and C-termini of the subject sequence, which are not matched/aligned with the query sequence, are considered for the purposes of manually adjusting the percent identity score. That is, only query residue positions outside the farthest N- and C-terminal residues of the subject sequence are considered for this manual correction. For example, a 90 amino acid residue subject sequence is aligned with a 100 residue query sequence to determine percent identity. The deletion occurs at the N-terminus of the subject sequence and therefore, the FASTDB alignment does not show a matching/alignment of the first 10 residues at the N-terminus. The 10 unpaired residues represent 10% of the sequence (number of residues at the N- and C-termini not matched/total number of residues in the query sequence) so 10% is subtracted from the percent identity score calculated by the FASTDB program. If the remaining 90 residues were perfectly matched the final percent identity would be 90%. In another example, a 90 residue subject sequence is compared with a 100 residue query sequence. This time the deletions are internal deletions so there are no residues at the N- or C-termini of the subject sequence which are not matched/aligned with the query. In this case the percent identity calculated by FASTDB is not manually corrected. Once again, only residue positions outside the N- and C-terminal ends of the subject sequence, as displayed in the FASTDB alignment, which are not matched/aligned with the query sequence are manually corrected for.

[0155] More generally, nucleic acid constructs can be prepared comprising an isolated polynucleotide encoding a polypeptide having enzyme activity operably linked to one or more (several) control sequences that direct the expression of the coding sequence in a microorganism, such as E. coli, under conditions compatible with the control sequences. The isolated polynucleotide may be manipulated to provide for expression of the polypeptide. Manipulation of the polynucleotide's sequence prior to its insertion into a vector may be desirable or necessary depending on the expression vector. The techniques for modifying polynucleotide sequences utilizing recombinant DNA methods are well established in the art.

[0156] The control sequence may be an appropriate promoter sequence, a nucleotide sequence that is recognized by a host cell for expression of a polynucleotide encoding a polypeptide of the present invention. The promoter sequence contains transcriptional control sequences that mediate the expression of the polypeptide. The promoter may be any nucleotide sequence that shows transcriptional activity in the host cell of choice including mutant, truncated, and hybrid promoters, and may be obtained from genes encoding extracellular or intracellular polypeptides either homologous or heterologous to the host cell. Examples of suitable promoters for directing transcription of the nucleic acid constructs, especially in an E. coli host cell, are the lac promoter (Gronenborn, 1976, MoI. Gen. Genet. 148: 243-250), tac promoter (DeBoer et al., 1983, Proceedings of the National Academy of Sciences USA 80: 21-25), trc promoter (Brosius et al, 1985, J. Biol. Chem. 260: 3539-3541), T7 RNA polymerase promoter (Studier and Moffatt, 1986, J. MoI. Biol. 189: 113-130), phage promoter p_{L} (Elvin et al., 1990, Gene 87: 123-126), tetA promoter (Skerra, 1994, Gene 151: 131-135), araBAD promoter (Guzman et al., 1995, J. Bacteriol. 177: 4121-4130), and rhaP_{BAD} promoter (Haldimann et al., 1998, J. Bacteriol. 180: 1277-1286). Other promoters are described in “Useful proteins from recombinant bacteria” in Scientific American, 1980, 242: 74-94; and in Sambrook and Russell, “Molecular Cloning: A Laboratory Manual,” Third Edition 2001 (volumes 1-3), Cold Spring Harbor Laboratory Press, Cold Spring Harbor, N.Y.

[0157] The control sequence may also be a suitable transcription terminator sequence, a sequence recognized by a host cell to terminate transcription. The terminator sequence is operably linked to the 3′ terminus of the nucleotide sequence encoding the polypeptide. Any terminator that is functional in an E. coli cell may be used in the present invention. It may also be desirable to add regulatory sequences that allow regulation of the expression of the polypeptide relative to the growth of the host cell. Examples of regulatory systems are those that cause the expression of the gene to be turned on or off in response to a chemical or physical stimulus, including the presence of a regulatory compound. Regulatory systems in prokaryotic systems include the lac, tac, and trp operator systems.

[0158] For various embodiments of the invention the genetic manipulations may be described to include various genetic manipulations, including those directed to change regulation of, and therefore ultimate activity of, an enzyme or enzymatic activity of an enzyme identified in any of the respective pathways. Such genetic modifications may be directed to transcriptional, translational, and post-translational modifications that result in a change of enzyme activity and/or selectivity under selected and/or identified culture conditions and/or to provision of additional nucleic acid sequences such as to increase copy number and/or mutants of an enzyme related to 3-HP production. Specific methodologies and approaches to achieve such genetic modification are well known to one skilled in the art, and include, but are not limited to: increasing expression of an endogenous genetic element; decreasing functionality of a repressor gene; introducing a heterologous genetic element; increasing copy number of a nucleic acid sequence encoding a polypeptide catalyzing an enzymatic conversion step to produce 3-HP; mutating a genetic element to provide a mutated protein to increase specific enzymatic activity; over-expressing; under-expressing; over-expressing a chaperone; knocking out a protease; altering or modifying feedback inhibition; providing an enzyme variant comprising one or more of an impaired binding site for a repressor and/or competitive inhibitor; knocking out a repressor gene; evolution, selection and/or other approaches to improve mRNA stability as well as use of plasmids having an effective copy number and promoters to achieve an effective level of improvement. Random mutagenesis may be practiced to provide genetic modifications that may fall into any of these or other stated approaches. The genetic modifications further broadly fall into additions (including insertions), deletions (such as by a mutation) and substitutions of one or more nucleic acids in a nucleic acid of interest. In various embodiments a genetic modification results in improved enzymatic specific activity and/or turnover number of an enzyme. Without being limited, changes may be measured by one or more of the following: K_{M}; K_{cat}; and K_{avidity}.

[0159] In various embodiments, to function more efficiently, a microorganism may comprise one or more gene deletions. For example, in E. coli, the genes encoding the lactate dehydrogenase (ldhA), phosphate acetyltransferase (pta), pyruvate oxidase (poxB), and pyruvate-formate lyase (pflB) may be disrupted, including deleted. Such gene disruptions, including deletions, are not meant to be limiting, and may be implemented in various combinations in various embodiments. Gene deletions may be accomplished by mutational gene deletion approaches, and/or starting with a mutant strain having reduced or no expression of one or more of these enzymes, and/or other methods known to those skilled in the art. Gene deletions may be effectuated by any of a number of known specific methodologies, including but not limited to the RED/ET methods using kits and other reagents sold by Gene Bridges (Gene Bridges GmbH, Dresden, Germany, <<www.genebridges.com>>).

[0160] More particularly as to the latter method, use of Red/ET recombination, is known to those of ordinary skill in the art and described in U.S. Pat. Nos. 6,355,412 and 6,509,156, issued to Stewart et al. and incorporated by reference herein for its teachings of this method. Material and kits for such method are available from Gene Bridges (Gene Bridges GmbH, Dresden, Germany, <<www.genebridges.com>>), and the method may proceed by following the manufacturer's instructions. The method involves replacement of the target gene by a selectable marker via homologous recombination performed by the recombinase from λ-phage. The host organism expressing λ-red recombinase is transformed with a linear DNA product coding for a selectable marker flanked by the terminal regions (generally ˜50 bp, and alternatively up to about ˜300 bp) homologous with the target gene. The marker could then be removed by another recombination step performed by a plasmid vector carrying the FLP-recombinase, or another recombinase, such as Cre.

[0161] Targeted deletion of parts of microbial chromosomal DNA or the addition of foreign genetic material to microbial chromosomes may be practiced to alter a host cell's metabolism so as to reduce or eliminate production of undesired metabolic products. This may be used in combination with other genetic modifications such as described herein in this general example. In this detailed description, reference has been made to multiple embodiments and to the accompanying drawings in which is shown by way of illustration specific exemplary embodiments in which the invention may be practiced. These embodiments are described in sufficient detail to enable those skilled in the art to practice the invention, and it is to be understood that modifications to the various disclosed embodiments may be made by a skilled artisan.

[0162] Further, for 3-HP production, such genetic modifications may be chosen and/or selected for to achieve a higher flux rate through certain enzymatic conversion steps within the respective 3-HP production pathway and so may affect general cellular metabolism in fundamental and/or major ways.

[0163] It will be appreciated that amino acid “homology” includes conservative substitutions, i.e. those that substitute a given amino acid in a polypeptide by another amino acid of similar characteristics. Typically seen as conservative substitutions are the following replacements: replacements of an aliphatic amino acid such as Ala, Val, Leu and Ile with another aliphatic amino acid; replacement of a Ser with a Thr or vice versa; replacement of an acidic residue such as Asp or Glu with another acidic residue; replacement of a residue bearing an amide group, such as Asn or Gln, with another residue bearing an amide group; exchange of a basic residue such as Lys or Arg with another basic residue; and replacement of an aromatic residue such as Phe or Tyr with another aromatic residue.

[0164] For all nucleic acid and amino acid sequences provided herein, it is appreciated that conservatively modified variants of these sequences are included, and are within the scope of the invention in its various embodiments. Functionally equivalent nucleic acid and amino acid sequences (functional variants), which may include conservatively modified variants as well as more extensively varied sequences, which are well within the skill of the person of ordinary skill in the art, and microorganisms comprising these, also are within the scope of various embodiments of the invention, as are methods and systems comprising such sequences and/or microorganisms. In various embodiments, nucleic acid sequences encoding sufficiently homologous proteins or portions thereof are within the scope of the invention. More generally, nucleic acids sequences that encode a particular amino acid sequence employed in the invention may vary due to the degeneracy of the genetic code, and nonetheless fall within the scope of the invention. The following table provides a summary of similarities among amino acids, upon which conservative and less conservative substitutions may be based, and also various codon redundancies that reflect this degeneracy.

TABLE 1A

| Amino Acid | Relationships | DNA codons |
|---|---|---|
| Alanine | N, Ali | GCT, GCC, GCA, GCG |
| Proline | N | CCT, CCC, CCA, CCG |
| Valine | N, Ali | GTT, GTC, GTA, GTG |
| Leucine | N, Ali | CTT, CTC, CTA, CTG, |
| | | TTA, TTG |
| Isoleucine | N, Ali | ATT, ATC, ATA |
| Methionine | N | ATG |
| Phenylalanine | N, Aro | TTT, TTC |
| Tryptophan | N | TGG |
| Glycine | PU | GGT, GGC, GGA, GGG |
| Serine | PU | TCT, TCC, TCA, TCG, |
| | | AGT, AGC |
| Threonine | PU | ACT, ACC, ACA, ACG |
| Asparagine | PU, Ami | AAT, AAC |
| Glutamine | PU, Ami | CAA, CAG |
| Cysteine | PU | TGT, TGC |
| Aspartic acid | NEG, A | GAT, GAC |
| Glutamic acid | NEG, A | GAA, GAG |
| Arginine | POS, B | CGT, CGC, CGA, CGG, |
| | | AGA, AGG |
| Lysine | POS, B | AAA, AAG |
| Histidine | POS | CAT, CAC |
| Tyrosine | Aro | TAT, TAC |
| Stop Codons | | TAA, TAG, TGA |

Legend: side groups and other related properties: A = acidic; B = basic; Ali = aliphatic; Ami = amine; Aro = aromatic; N = nonpolar; PU = polar uncharged; NEG = negatively charged; POS = positively charged.

[0165] Also, variants and portions of particular nucleic acid sequences, and respective encoded amino acid sequences recited herein may be exhibit a desired functionality, e.g., enzymatic activity at a selected level, when such nucleic acid sequence variant and/or portion contains a 15 nucleotide sequence identical to any 15 nucleotide sequence set forth in the nucleic acid sequences recited herein including, without limitation, the sequence starting at nucleotide number 1 and ending at nucleotide number 15, the sequence starting at nucleotide number 2 and ending at nucleotide number 16, the sequence starting at nucleotide number 3 and ending at nucleotide number 17, and so forth. It will be appreciated that the invention also provides isolated nucleic acid that contains a nucleotide sequence that is greater than 15 nucleotides (e.g., 16, 17, 18, 19, 20, 21, 22, 23, 24, 25, 26, 27, 28, 29, 30 or more nucleotides) in length and identical to any portion of the sequence set forth in nucleic acid sequences recited herein. For example, the invention provides isolated nucleic acid that contains a 25 nucleotide sequence identical to any 25 nucleotide sequence set forth in any one or more (including any grouping of) nucleic acid sequences recited herein including, without limitation, the sequence starting at nucleotide number 1 and ending at nucleotide number 25, the sequence starting at nucleotide number 2 and ending at nucleotide number 26, the sequence starting at nucleotide number 3 and ending at nucleotide number 27, and so forth. Additional examples include, without limitation, isolated nucleic acids that contain a nucleotide sequence that is 50 or more nucleotides (e.g., 100, 150, 200, 250, 300, or more nucleotides) in length and identical to any portion of any of the sequences disclosed herein. Such isolated nucleic acids can include, without limitation, those isolated nucleic acids containing a nucleic acid sequence represented in any one section of discussion and/or examples, such as regarding 3-HP production pathways, nucleic acid sequences encoding enzymes of the fatty acid synthase system, or 3-HP tolerance. For example, the invention provides an isolated nucleic acid containing a nucleic acid sequence listed herein that contains a single insertion, a single deletion, a single substitution, multiple insertions, multiple deletions, multiple substitutions, or any combination thereof (e.g., single deletion together with multiple insertions). Such isolated nucleic acid molecules can share at least 60, 65, 70, 75, 80, 85, 90, 95, 97, 98, or 99 percent sequence identity with a nucleic acid sequence listed herein (i.e., in the sequence listing).

[0166] Additional examples include, without limitation, isolated nucleic acids that contain a nucleic acid sequence that encodes an amino acid sequence that is 50 or more amino acid residues (e.g., 100, 150, 200, 250, 300, or more amino acid residues) in length and identical to any portion of an amino acid sequence listed or otherwise disclosed herein.

[0167] In addition, the invention provides isolated nucleic acid that contains a nucleic acid sequence that encodes an amino acid sequence having a variation of an amino acid sequence listed or otherwise disclosed herein. For example, the invention provides isolated nucleic acid containing a nucleic acid sequence encoding an amino acid sequence listed or otherwise disclosed herein that contains a single insertion, a single deletion, a single substitution, multiple insertions, multiple deletions, multiple substitutions, or any combination thereof (e.g., single deletion together with multiple insertions). Such isolated nucleic acid molecules can contain a nucleic acid sequence encoding an amino acid sequence that shares at least 60, 65, 70, 75, 80, 85, 90, 95, 97, 98, or 99 percent sequence identity with an amino acid sequence listed or otherwise disclosed herein.

[0168] Examples of properties that provide the bases for conservative and other amino acid substitutions are exemplified in Table 1A. Accordingly, one skilled in the art may make numerous substitutions to obtain an amino acid sequence variant that exhibits a desired functionality. BLASTP, CLUSTALP, and other alignment and comparison tools may be used to assess highly conserved regions, to which fewer substitutions may be made (unless directed to alter activity to a selected level, which may require multiple substitutions). More substitutions may be made in regions recognized or believed to not be involved with an active site or other binding or structural motif. In accordance with Table 1A, for example, substitutions may be made of one polar uncharged (PU) amino acid for a polar uncharged amino acid of a listed sequence, optionally considering size/molecular weight (i.e., substituting a serine for a threonine). Guidance concerning which amino acid changes are likely to be phenotypically silent can be found, inter alia, in Bowie, J. U., et Al., “Deciphering the Message in Protein Sequences: Tolerance to Amino Acid Substitutions,” Science 247:1306-1310 (1990). This reference is incorporated by reference for such teachings, which are, however, also generally known to those skilled in the art. Recognized conservative amino acid substitutions comprise (substitutable amino acids following each colon of a set): ala:ser; arg:lys; asn:gln or his; asp:glu; cys:ser; gln:asn; glu:asp; gly:pro; his:asn or gln; ile:leu or val; leu:ile or val; lys: arg or gln or glu; met:leu or ile; phe:met or leu or tyr; ser:thr; thr:ser; trp:tyr; tyr:trp or phe; val:ile or leu.

[0169] It is noted that codon preferences and codon usage tables for a particular species can be used to engineer isolated nucleic acid molecules that take advantage of the codon usage preferences of that particular species. For example, the isolated nucleic acid provided herein can be designed to have codons that are preferentially used by a particular organism of interest. Numerous software and sequencing services are available for such codon-optimizing of sequences.

[0170] The invention provides polypeptides that contain the entire amino acid sequence of an amino acid sequence listed or otherwise disclosed herein. In addition, the invention provides polypeptides that contain a portion of an amino acid sequence listed or otherwise disclosed herein. For example, the invention provides polypeptides that contain a 15 amino acid sequence identical to any 15 amino acid sequence of an amino acid sequence listed or otherwise disclosed herein including, without limitation, the sequence starting at amino acid residue number 1 and ending at amino acid residue number 15, the sequence starting at amino acid residue number 2 and ending at amino acid residue number 16, the sequence starting at amino acid residue number 3 and ending at amino acid residue number 17, and so forth. It will be appreciated that the invention also provides polypeptides that contain an amino acid sequence that is greater than 15 amino acid residues (e.g., 16, 17, 18, 19, 20, 21, 22, 23, 24, 25, 26, 27, 28, 29, 30 or more amino acid residues) in length and identical to any portion of an amino acid sequence listed or otherwise disclosed herein For example, the invention provides polypeptides that contain a 25 amino acid sequence identical to any 25 amino acid sequence of an amino acid sequence listed or otherwise disclosed herein including, without limitation, the sequence starting at amino acid residue number 1 and ending at amino acid residue number 25, the sequence starting at amino acid residue number 2 and ending at amino acid residue number 26, the sequence starting at amino acid residue number 3 and ending at amino acid residue number 27, and so forth. Additional examples include, without limitation, polypeptides that contain an amino acid sequence that is 50 or more amino acid residues (e.g., 100, 150, 200, 250, 300 or more amino acid residues) in length and identical to any portion of an amino acid sequence listed or otherwise disclosed herein. Further, it is appreciated that, per above, a 15 nucleotide sequence will provide a 5 amino acid sequence, so that the latter, and higher-length amino acid sequences, may be defined by the above-described nucleotide sequence lengths having identity with a sequence provided herein.

[0171] In addition, the invention provides polypeptides that an amino acid sequence having a variation of the amino acid sequence set forth in an amino acid sequence listed or otherwise disclosed herein. For example, the invention provides polypeptides containing an amino acid sequence listed or otherwise disclosed herein that contains a single insertion, a single deletion, a single substitution, multiple insertions, multiple deletions, multiple substitutions, or any combination thereof (e.g., single deletion together with multiple insertions). Such polypeptides can contain an amino acid sequence that shares at least 60, 65, 70, 75, 80, 85, 90, 95, 97, 98 or 99 percent sequence identity with an amino acid sequence listed or otherwise disclosed herein. A particular variant amino acid sequence may comprise any number of variations as well as any combination of types of variations.

[0172] The invention includes, in various embodiments, an amino acid sequence having a variation of any of the polynucleotide and polypeptide sequences disclosed herein. As one example, variations are exemplified for the carbonic anhydrase (E. coli cynT) amino acid sequence set forth in SEQ ID NO:544. FIG. 3 provides a CLUSTAL multiple sequence alignment of the E. coli carbonic anhydrase aligned with carbonic anhydrases of eleven other species that had relatively high homology, based on low E values, in a BLASTP comparison. SEQ ID NO:544 is the fifth sequence shown. Multiple conservative and less conservative substitutions are shown (i.e., by the “:” and “.” designations, respectively), which can lead to additional modifications by one skilled in the art. Thus, examples of variations of the sequence set forth in SEQ ID NO:544 include, without limitation, any variation of the sequences as set forth in FIG. 3. Such variations are provided in FIG. 3 in that a comparison of the amino acid residue (or lack thereof) at a particular position of the sequence set forth in SEQ ID NO:544 with the amino acid residue (or lack thereof) at the same aligned position of any of the other eleven amino acid sequences of FIG. 3 provides a list of specific changes for the sequence set forth in SEQ ID NO:544. For example, the “E” glutamic acid at position 14 of SEQ ID NO:544 can be substituted with a “D” aspartic acid or “N” asparagine as indicated in FIG. 3. It will be appreciated that the sequence set forth in SEQ ID NO:544 can contain any number of variations as well as any combination of types of variations. It is noted that the amino acid sequences provided in FIG. 3 can be polypeptides having carbonic anhydrase activity.

[0173] As indicated herein, polypeptides having a variant amino acid sequence can retain enzymatic activity. Such polypeptides can be produced by manipulating the nucleotide sequence encoding a polypeptide using standard procedures such as site-directed mutagenesis or various PCRn techniques. As noted herein, one type of modification includes the substitution of one or more amino acid residues for amino acid residues having a similar chemical and/or biochemical property. For example, a polypeptide can have an amino acid sequence set forth in an amino acid sequence listed or otherwise disclosed herein comprising one or more conservative substitutions.

[0174] More substantial changes can be obtained by selecting substitutions that are less conservative, and/or in areas of the sequence that may be more critical, for example selecting residues that differ more significantly in their effect on maintaining: (a) the structure of the polypeptide backbone in the area of the substitution, for example, as a sheet or helical conformation; (b) the charge or hydrophobicity of the polypeptide at the target site; or (c) the bulk of the side chain. The substitutions that in general are expected to produce the greatest changes in polypeptide function are those in which: (a) a hydrophilic residue, e.g., serine or threonine, is substituted for (or by) a hydrophobic residue, e.g., leucine, isoleucine, phenylalanine, valine or alanine; (b) a cysteine or proline is substituted for (or by) any other residue; (c) a residue having an electropositive side chain, e.g., lysine, arginine, or histidine, is substituted for (or by) an electronegative residue, e.g., glutamic acid or aspartic acid; or (d) a residue having a bulky side chain, e.g., phenylalanine, is substituted for (or by) one not having a side chain, e.g., glycine. The effects of these amino acid substitutions (or other deletions or additions) can be assessed for polypeptides having enzymatic activity by analyzing the ability of the polypeptide to catalyze the conversion of the same substrate as the related native polypeptide to the same product as the related native polypeptide. Accordingly, polypeptides having 5, 10, 20, 30, 40, 50 or less conservative substitutions are provided by the invention.

[0175] Polypeptides and nucleic acids encoding polypeptides can be produced by standard DNA mutagenesis techniques, for example, M13 primer mutagenesis. Details of these techniques are provided in Sambrook and Russell, 2001. Nucleic acid molecules can contain changes of a coding region to fit the codon usage bias of the particular organism into which the molecule is to be introduced.

[0176] Alternatively, the coding region can be altered by taking advantage of the degeneracy of the genetic code to alter the coding sequence in such a way that, while the nucleic acid sequence is substantially altered, it nevertheless encodes a polypeptide having an amino acid sequence identical or substantially similar to the native amino acid sequence. For example, alanine is encoded in the open reading frame by the nucleotide codon triplet GCT. Because of the degeneracy of the genetic code, three other nucleotide codon triplets—GCA, GCC, and GCG—also code for alanine. Thus, the nucleic acid sequence of the open reading frame can be changed at this position to any of these three codons without affecting the amino acid sequence of the encoded polypeptide or the characteristics of the polypeptide. Based upon the degeneracy of the genetic code, nucleic acid variants can be derived from a nucleic acid sequence disclosed herein using standard DNA mutagenesis techniques as described herein, or by synthesis of nucleic acid sequences. Thus, for various embodiments the invention encompasses nucleic acid molecules that encode the same polypeptide but vary in nucleic acid sequence by virtue of the degeneracy of the genetic code.

[0177] The invention also provides an isolated nucleic acid that is at least about 12 bases in length (e.g., at least about 13, 14, 15, 16, 17, 18, 19, 20, 25, 30, 40, 50, 60, 100, 250, 500, 750, 1000, 1500, 2000, 3000, 4000, or 5000 bases in length) and hybridizes, under hybridization conditions, to the sense or antisense strand of a nucleic acid having a sequence listed or otherwise disclosed herein. The hybridization conditions can be moderately or highly stringent hybridization conditions. Also, in some embodiments the microorganism comprises an endogenous 3-HP production pathway (which may, in some such embodiments, be enhanced), whereas in other embodiments the microorganism does not comprise a 3-HP production pathway, but is provided with one or more nucleic acid sequences encoding polypeptides having enzymatic activity or activities to complete a pathway, described herein, resulting in production of 3-HP. In some embodiments, the particular sequences disclosed herein, or conservatively modified variants thereof, are provided to a selected microorganism, such as selected from one or more of the species and groups of species or other taxonomic groups listed herein.

[0178] VI. Redirecting Malonyl-CoA from Fatty Acid Synthesis to a Chemical Product

[0179] Compositions of the present invention, such as genetically modified microorganisms, comprise a production pathway for a chemical product in which malonyl-CoA is a substrate, and may also comprise one or more genetic modifications to reduce the activity of enzymes encoded by one or more of the fatty acid synthetase system genes. The compositions may be used in the methods and systems of the present invention.

[0180] Regarding microbial fermentation of a number of chemical products in many microorganisms of commercial fermentation interest, malonyl-CoA is a metabolic intermediate that, under normal growth conditions, is converted to fatty acids and derivatives thereof, such as phospholipids, that are then used in cell membranes and for other key cellular functions. For example, in Escherichia coli, the fatty acid synthase system is a type II or dissociated fatty acid synthase system. In this system the enzymes of fatty acid production pathway are encoded by distinct genes, and, common for many critical metabolic pathways, is well-regulated, including by downstream products inhibiting upstream enzymes.

[0181] In various microorganisms conversion of the metabolic intermediate malonyl-CoA to fatty acids via a fatty acid synthesis system (i.e., pathway or complex) is the only or the major use of malonyl-CoA. It has been determined that when a production pathway to an alternative chemical product exists in a microorganism, reducing such conversion of malonyl-CoA to fatty acids can improve metrics for production of that alternative chemical product (e.g., a polyketide or 3-HP). For example, in many microorganism cells the fatty acid synthase system comprises polypeptides that have the following enzymatic activities: malonyl-CoA-acyl carrier protein (ACP) transacylase; β-ketoacyl-ACP synthase; β-ketoacyl-ACP reductase; β-hydroxyacyl-ACP dehydratase; 3-hydroxyacyl-(acp) dehydratase; and enoyl-acyl carrier protein reductase (enoyl-ACP reductase). In various embodiments nucleic acid sequences that encode temperature-sensitive forms of these polypeptides may be introduced in place of the native enzymes, and when such genetically modified microorganisms are cultured at elevated temperatures (at which these thermolabile polypeptides become inactivated, partially or completely, due to alterations in protein structure or complete denaturation), there is observed an increase in a product such as 3-HP THN or flaviolin. In other embodiments other types of genetic modifications may be made to otherwise modulate, such as lower, enzymatic activities of one or more of these polypeptides. In various embodiments a result of such genetic modifications is to shift malonyl-CoA utilization so that there is a reduced conversion of malonyl-CoA to fatty acids, overall biomass, and proportionally greater conversion of carbon source to a chemical product such as 3-HP. In various embodiments, the specific productivity for the microbially produced chemical product is unexpectedly high. Also, additional genetic modifications, such as to increase malonyl-CoA production, may be made for certain embodiments.

[0182] One enzyme, enoyl(acyl carrier protein) reductase (EC No. 1.3.1.9, also referred to as enoyl-ACP reductase) is a key enzyme for fatty acid biosynthesis from malonyl-CoA. In Escherichia coli this enzyme, FabI, is encoded by the gene fabI (See “Enoyl-Acyl Carrier Protein (fabI) Plays a Determinant Role in Completing Cycles of Fatty Acid Elongation in Escherichia coli,” Richard J. Heath and Charles O. Rock, J. Biol. Chem. 270:44, pp. 26538-26543 (1995), incorporated by reference for its discussion of fabI and the fatty acid synthase system).

[0183] The present invention may utilize a microorganism that is provided with a nucleic acid sequence (polynucleotide) that encodes a polypeptide having enoyl-ACP reductase enzymatic activity that may be modulated during a fermentation event. For example, a nucleic acid sequence encoding a temperature-sensitive enoyl-ACP reductase may be provided in place of the native enoyl-ACP reductase, so that an elevated culture temperature results in reduced enzymatic activity, which then results in a shifting utilization of malonyl-CoA to production of a desired chemical product. At such elevated temperature the enzyme is considered non-permissive, as is the temperature. One such sequence is a mutant temperature-sensitive fabI (fabI^{TS}) of E. coli, SEQ ID NO:769 for DNA, SEQ ID NO:770 for protein.

[0184] It is appreciated that nucleic acid and amino acid sequences for enoyl-ACP reductase in species other than E. coli are readily obtained by conducting homology searches in known genomics databases, such as BLASTN and BLASTP. Approaches to obtaining homologues in other species and functional equivalent sequences are described herein. Accordingly, it is appreciated that the present invention may be practiced by one skilled in the art for many microorganism species of commercial interest.

[0185] Other approaches than a temperature-sensitive enoyl-ACP reductase may be employed as known to those skilled in the art, such as, but not limited to, replacing a native enoyl-ACP or enoyl-coA reductase with a nucleic acid sequence that includes an inducible promoter for this enzyme, so that an initial induction may be followed by no induction, thereby decreasing enoyl-ACP or enoyl-coA reductase enzymatic activity after a selected cell density is attained.

[0186] In some aspects, compositions, methods and systems of the present invention shift utilization of malonyl-CoA in a genetic modified microorganism, which comprises at least one enzyme of the fatty acid synthase system, such as enoyl-acyl carrier protein reductase (enoyl-ACP reductase) or enoyl-coenzyme A reductase (enoyl-coA reductase), β-ketoacyl-ACP synthase or β-ketoacyl-coA synthase malonyl-CoA-ACP, and may further comprise at least one genetic modification of nucleic acid sequence encoding carbonic anhydrase to increase bicarbonate levels in the microorganism cell and/or a supplementation of its culture medium with bicarbonate and/or carbonate, and may further comprise one or more genetic modifications to increase enzymatic activity of one or more of acetyl-CoA carboxylase and NADPH-dependent transhydrogenase. More generally, addition of carbonate and/or bicarbonate may be used to increase bicarbonate levels in a fermentation broth.

[0187] In some aspects, the present invention comprises a genetically modified microorganism that comprises at least one genetic modification that provides, completes, or enhances a 3-HP production pathway effective to convert malonyl-CoA to 3-HP, and further comprises a genetic modification of carbonic anhydrase to increase bicarbonate levels in the microorganism cell and/or a supplementation of its culture medium with bicarbonate and/or carbonate, and may further comprise one or more genetic modifications to increase enzymatic activity of one or more of acetyl-CoA carboxylase and NADPH-dependent transhydrogenase. Related methods and systems utilize such genetically modified microorganism.

[0188] In some aspects, the present invention comprises a genetically modified microorganism that comprises at least one genetic modification that provides, completes, or enhances a 3-HP production pathway effective to convert malonyl-CoA to 3-HP, and further comprises a genetic modification of at least one enzyme of the fatty acid synthase system, such as enoyl-acyl carrier protein reductase (enoyl-ACP reductase) or enoyl-coenzyme A reductase (enoyl-coA reductase), β-ketoacyl-ACP synthase or β-ketoacyl-coA synthase, malonyl-CoA-ACP, and may further comprise a genetic modification of carbonic anhydrase to increase bicarbonate levels in the microorganism cell and/or a supplementation of its culture medium with bicarbonate and/or carbonate, and may further comprise one or more genetic modifications to increase enzymatic activity of one or more of acetyl-CoA carboxylase and NADPH-dependent transhydrogenase. Related methods and systems utilize such genetically modified microorganism.

[0189] In various embodiments the present invention is directed to a method of making a chemical product comprising: providing a selected cell density of a genetically modified microorganism population in a vessel, wherein the genetically modified microorganism comprises a production pathway for production of a chemical product from malonyl-CoA; and reducing enzymatic activity of at least one enzyme of the genetically modified microorganism's fatty acid synthase pathway.

[0190] In various embodiments, reducing the enzymatic activity of an enoyl-ACP reductase in a microorganism host cell results in production of 3-HP at elevated specific and volumetric productivity. In still other embodiments, reducing the enzymatic activity of an enoyl-CoA reductase in a microorganism host cell results in production of 3-HP at elevated specific and volumetric productivity.

[0191] Another approach to genetic modification to reduce enzymatic activity of these enzymes is to provide an inducible promoter that promotes one such enzyme, such as the enoyl-ACP reductase gene (e.g., fabI in E. coli). In such example this promoter may be induced (such as with isopropyl-μ-D-thiogalactopyranoiside (IPTG)) during a first phase of a method herein, and after the IPTG is exhausted, removed or diluted out the second step, of reducing enoyl-ACP reductase enzymatic activity, may begin. Other approaches may be applied to control enzyme expression and activity such as are described herein and/or known to those skilled in the art.

[0192] While enoyl-CoA reductase is considered an important enzyme of the fatty acid synthase system, genetic modifications may be made to any combination of the polynucleotides (nucleic acid sequences) encoding the polypeptides exhibiting the enzymatic activities of this system, such as are listed herein. For example, FabB, β-ketoacyl-acyl carrier protein synthase I, is an enzyme in E. coli that is essential for growth and the biosynthesis of both saturated and unsaturated fatty acids. Inactivation of FabB results in the inhibition of fatty acid elongation and diminished cell growth as well as eliminating a futile cycle that recycles the malonate moiety of malonyl-ACP back to acetyl-CoA. FabF, β-ketoacyl-acyl carrier protein synthase II, is required for the synthesis of saturated fatty acids and the control membrane fluidity in cells. Both enzymes are inhibited by cerulenin.

[0193] It is reported that overexpression of FabF results in diminished fatty acid biosynthesis. It is proposed that FabF outcompetes FabB for association with FabD, malonyl-CoA:ACP transacylase. The association of FabB with FabD is required for the condensation reaction that initiates fatty acid elongation. (See Microbiological Reviews, September 1993, p. 522-542 Vol. 57, No. 3; K. Magnuson et al., “Regulation of Fatty Acid Biosynthesis in Escherichia coli,” American Society for Microbiology; W. Zha et al., “Improving cellular malonyl-CoA level in Escherichia coli via metabolic engineering,” Metabolic Engineering 11 (2009) 192-198). An alternative to genetic modification to reduce such fatty acid synthase enzymes is to provide into a culture system a suitable inhibitor of one or more such enzymes. This approach may be practiced independently or in combination with the genetic modification approach. Inhibitors, such as cerulenin, thiolactomycin, and triclosan (this list not limiting) or genetic modifications directed to reduce activity of enzymes encoded by one or more of the fatty acid synthetase system genes may be employed, singly or in combination.

[0194] Without being bound to a particular theory, it is believed that reducing the enzymatic activity of enoyl-ACP reductase (and/or of other enzymes of the fatty acid synthase system) in a microorganism leads to an accumulation and/or shunting of malonyl-CoA, a metabolic intermediate upstream of the enzyme, and such malonyl-CoA may then be converted to a chemical product for which the microorganism cell comprises a metabolic pathway that utilizes malonyl-CoA. In certain compositions, methods and systems of the present invention the reduction of enzymatic activity of enoyl-ACP reductase (or, more generally, of the fatty acid synthase system) is made to occur after a sufficient cell density of a genetically modified microorganism is attained. This bi-phasic culture approach balances a desired quantity of catalyst, in the cell biomass which supports a particular production rate, with yield, which may be partly attributed to having less carbon be directed to cell mass after the enoyl-ACP reductase activity (and/or activity of other enzymes of the fatty acid synthase system) is/are reduced. This results in a shifting net utilization of malonyl-CoA, thus providing for greater carbon flux to a desired chemical product.

[0195] In various embodiments of the present invention the specific productivity is elevated and this results in overall rapid and efficient microbial fermentation methods and systems. In various embodiments the volumetric productivity also is substantially elevated.

[0196] In various embodiments a genetically modified microorganism comprises a metabolic pathway that includes conversion of malonyl-CoA to a desired chemical product, 3-hydroxypropionic acid (3-HP). This is viewed as quite advantageous for commercial 3-HP production economics and is viewed as an advance having clear economic benefit.

[0197] In various embodiments a genetically modified microorganism comprises a metabolic pathway that includes conversion of malonyl-CoA to a selected chemical product, selected from various polyketides such as those described herein. This is viewed as quite advantageous for commercial production economics for such polyketide chemical products and is viewed as an advance having clear economic benefit. Other chemical products also are disclosed herein.

[0198] The improvements in both specific and volumetric productivity parameters are unexpected and advance the art.

[0199] The reduction of enoyl-ACP reductase activity and/or of other enzymes of the fatty acid synthase system may be achieved in a number of ways, as is discussed herein.

[0200] By “means for modulating” the conversion of malonyl-CoA to fatty acyl-ACP or fatty acyl-coA molecules, and to fatty acid molecules, is meant any one of the following: 1) providing in a microorganism cell at least one polynucleotide that encodes at least one polypeptide having activity of one of the fatty acid synthase system enzymes (such as recited herein), wherein the polypeptide so encoded has (such as by mutation and/or promoter substitution, etc., to lower enzymatic activity), or may be modulated to have (such as by temperature sensitivity, inducible promoter, etc.) a reduced enzymatic activity; 2) providing to a vessel comprising a microorganism cell or population an inhibitor that inhibits enzymatic activity of one or more of the fatty acid synthase system enzymes (such as recited herein), at a dosage effective to reduce enzymatic activity of one or more of these enzymes. These means may be provided in combination with one another. When a means for modulating involves a conversion, during a fermentation event, from a higher to a lower activity of the fatty acid synthetase system, such as by increasing temperature of a culture vessel comprising a population of genetically modified microorganism comprising a temperature-sensitive fatty acid synthetase system polypeptide (e.g., enoyl-ACP reductase), or by adding an inhibitor, there are conceived two modes—one during which there is higher activity, and a second during which there is lower activity, of such fatty acid synthetase system. During the lower activity mode, a shift to greater utilization of malonyl-CoA to a selected chemical product may proceed.

[0201] Once the modulation is in effect to decrease the noted enzymatic activity(ies), each respective enzymatic activity so modulated may be reduced by at least 10, at least 20, at least 30, at least 40, at least 50, at least 60, at least 70, at least 80, or at least 90 percent compared with the activity of the native, non-modulated enzymatic activity (such as in a cell or isolated). Similarly, the conversion of malonyl-CoA to fatty acyl-ACP or fatty acyl-coA molecules may be reduced by at least 10, at least 20, at least 30, at least 40, at least 50, at least 60, at least 70, at least 80, or at least 90 percent compared with such conversion in a non-modulated cell or other system. Likewise, the conversion of malonyl-CoA to fatty acid molecules may be reduced by at least 10, at least 20, at least 30, at least 40, at least 50, at least 60, at least 70, at least 80, or at least 90 percent compared with such conversion in a non-modulated cell or other system.

[0202] VII. Production Pathway from Malonyl-CoA to 3-HP

[0203] In various embodiments the compositions, methods and systems of the present invention involve inclusion of a metabolic production pathway that converts malonyl-CoA to a chemical product of interest.

[0204] As one example, 3-HP is selected as the chemical product of interest.

[0205] Further as to specific sequences for 3-HP production pathway, malonyl-CoA reductase (mcr) from C. aurantiacus was gene synthesized and codon optimized by the services of DNA 2.0. The FASTA sequence is shown in SEQ ID NO:783 (gi|42561982|gb|AAS20429.1| malonyl-CoA reductase (Chloroflexus aurantiacus)).

[0206] Mcr has very few sequence homologs in the NCBI data base. Blast searches finds 8 different sequences when searching over the entire protein. Hence development of a pile-up sequences comparison is expected to yield limited information. However, embodiments of the present invention nonetheless may comprise any of these eight sequences, shown herein and identified as SEQ ID NOs:784 to 791, which are expected to be but are not yet confirmed to be bi-functional as to this enzymatic activity. Other embodiments may comprise mutated and other variant forms of any of SEQ ID NOs:784 to 791, as well as polynucleotides (including variant forms with conservative and other substitutions), such as those introduced into a selected microorganism to provide or increase 3-HP production therein.

[0207] The portion of a CLUSTAL 2.0.11 multiple sequence alignment identifies these eight sequences with respective SEQ ID NOs: 783-791, as shown in the following table.

TABLE 2

| Reference Nos. | Seq ID No. | Genus Species |
|---|---|---|
| gi\|42561982\|gb\|AAS20429.1 | 783 | Chloroflexus aurantiacus |
| gi\|163848165\|ref\|YP_001636209 | 784 | Chloroflexus aurantiacus J-10-fl |
| gi\|219848167\|ref\|YP_002462600 | 785 | Chloroflexus aggregans DSM 9485 |
| gi\|156742880\|ref\|YP_001433009 | 786 | Roseiflexus castenholzii DSM 13941 |
| gi\|148657307\|ref\|YP_001277512 | 787 | Roseiflexus sp. RS-1 |
| gi\|85708113\|ref\|ZP_01039179.1 | 788 | Erythrobacter sp. NAP1 |
| gi\|254282228\|ref\|ZP_04957196.1 | 789 | gamma proteobacterium NOR51-B |
| gi\|254513883\|ref\|ZP_05125944.1 | 790 | gamma proteobacterium NOR5-3 |
| gi\|19504313\|ref\|ZP_01626393.1 | 791 | 3marine gamma proteobacterium HTCC208 |

[0208] Malonyl-CoA may be converted to 3-HP in a microorganism that comprises one or more of the following:

[0209] A bi-functional malonyl-CoA reductase, such as may be obtained from Chloroflexus aurantiacus and other microorganism species. By bi-functional in this regard is meant that the malonyl-CoA reductase catalyzes both the conversion of malonyl-CoA to malonate semialdehyde, and of malonate semialdehyde to 3-HP.

[0210] A mono-functional malonyl-CoA reductase in combination with a 3-HP dehydrogenase. By mono-functional is meant that the malonyl-CoA reductase catalyzes the conversion of malonyl-CoA to malonate semialdehyde.

[0211] Any of the above polypeptides may be NADH- or NADPH-dependent, and methods known in the art may be used to convert a particular enzyme to be either form. More particularly, as noted in WO 2002/042418, “any method can be used to convert a polypeptide that uses NADPH as a cofactor into a polypeptide that uses NADH as a cofactor such as those described by others (Eppink et al., J. Mol. Biol., 292 (1): 87-96 (1999), Hall and Tomsett, Microbiology, 146 (Pt 6): 1399-406 (2000), and Dohr et al., Proc. Natl. Acad. Sci., 98 (1): 81-86 (2001)).”

[0212] Without being limiting, a bi-functional malonyl-CoA reductase may be selected from the malonyl-CoA reductase of Chloroflexus aurantiacus (such as from ATCC 29365) and other sequences. Also without being limiting, a mono-functional malonyl-CoA reductase may be selected from the malonyl-CoA reductase of Sulfolobus tokodaii (SEQ ID NO:826). As to the malonyl-CoA reductase of C. aurantiacus, that sequence and other species' sequences may also be bi-functional as to this enzymatic activity.

[0213] When a mono-functional malonyl-CoA reductase is provided in a microorganism cell, 3-HP dehydrogenase enzymatic activity also may be provided to convert malonate semialdehyde to 3-HP. As shown in the examples, a mono-functional malonyl-CoA reductase may be obtained by truncation of a bi-functional mono-functional malonyl-CoA, and combined in a strain with an enzyme that converts malonate semialdehyde to 3-HP.

[0214] Also, it is noted that another malonyl-CoA reductase is known in Metallosphaera sedula (Msed_{—}709, identified as malonyl-CoA reductase/succinyl-CoA reductase).

[0215] By providing nucleic acid sequences that encode polypeptides having the above enzymatic activities, a genetically modified microorganism may comprise an effective 3-HP pathway to convert malonyl-CoA to 3-HP in accordance with the embodiments of the present invention.

[0216] Other 3-HP pathways, such as those comprising an aminotransferase (see, e.g., WO 2010/011874, published Jan. 28, 2010), may also be provided in embodiments of a genetically modified microorganism of the present invention.

[0217] Incorporated into this section, the present invention provides for elevated specific and volumetric productivity metrics as to production of a selected chemical product, such as 3-hydroxypropionic acid (3-HP). In various embodiments, production of a chemical product, such as 3-HP, is not linked to growth.

[0218] In various embodiments, production of 3-HP, or alternatively one of its downstream products such as described herein, may reach at least 1, at least 2, at least 5, at least 10, at least 20, at least 30, at least 40, and at least 50 g/liter titer, such as by using one of the methods disclosed herein.

[0219] As may be realized by appreciation of the advances disclosed herein as they relate to commercial fermentations of selected chemical products, embodiments of the present invention may be combined with other genetic modifications and/or method or system modulations so as to obtain a microorganism (and corresponding method) effective to produce at least 10, at least 20, at least 30, at least 40, at least 45, at least 50, at least 80, at least 100, or at least 120 grams of a chemical product, such as 3-HP, per liter of final (e.g., spent) fermentation broth while achieving this with specific and/or volumetric productivity rates as disclosed herein.

[0220] In some embodiments a microbial chemical production event (i.e., a fermentation event using a cultured population of a microorganism) proceeds using a genetically modified microorganism as described herein, wherein the specific productivity is between 0.01 and 0.60 grams of 3-HP produced per gram of microorganism cell on a dry weight basis per hour (g 3-HP/g DCW-hr). In various embodiments the specific productivity is greater than 0.01, greater than 0.05, greater than 0.10, greater than 0.15, greater than 0.20, greater than 0.25, greater than 0.30, greater than 0.35, greater than 0.40, greater than 0.45, or greater than 0.50 g 3-HP/g DCW-hr. Specific productivity may be assessed over a 2, 4, 6, 8, 12 or 24 hour period in a particular microbial chemical production event. More particularly, the specific productivity for 3-HP or other chemical product is between 0.05 and 0.10, 0.10 and 0.15, 0.15 and 0.20, 0.20 and 0.25, 0.25 and 0.30, 0.30 and 0.35, 0.35 and 0.40, 0.40 and 0.45, or 0.45 and 0.50 g 3-HP/g DCW-hr., 0.50 and 0.55, or 0.55 and 0.60 g 3-HP/g DCW-hr. Various embodiments comprise culture systems demonstrating such productivity.

[0221] Also, in various embodiments of the present invention the volumetric productivity achieved may be 0.25 g 3-HP (or other chemical product) per liter per hour (g (chemical product)/L-hr), may be greater than 0.25 g 3-HP (or other chemical product)/L-hr, may be greater than 0.50 g 3-HP (or other chemical product)/L-hr, may be greater than 1.0 g 3-HP (or other chemical product)/L-hr, may be greater than 1.50 g 3-HP (or other chemical product)/L-hr, may be greater than 2.0 g 3-HP (or other chemical product)/L-hr, may be greater than 2.50 g 3-HP (or other chemical product)/L-hr, may be greater than 3.0 g 3-HP (or other chemical product)/L-hr, may be greater than 3.50 g 3-HP (or other chemical product)/L-hr, may be greater than 4.0 g 3-HP (or other chemical product)/L-hr, may be greater than 4.50 g 3-HP (or other chemical product)/L-hr, may be greater than 5.0 g 3-HP (or other chemical product)/L-hr, may be greater than 5.50 g 3-HP (or other chemical product)/L-hr, may be greater than 6.0 g 3-HP (or other chemical product)/L-hr, may be greater than 6.50 g 3-HP (or other chemical product)/L-hr, may be greater than 7.0 g 3-HP (or other chemical product)/L-hr, may be greater than 7.50 g 3-HP (or other chemical product)/L-hr, may be greater than 8.0 g 3-HP (or other chemical product)/L-hr, may be greater than 8.50 g 3-HP (or other chemical product)/L-hr, may be greater than 9.0 g 3-HP (or other chemical product)/L-hr, may be greater than 9.50 g 3-HP (or other chemical product)/L-hr, or may be greater than 10.0 g 3-HP (or other chemical product)/L-hr.

[0222] In some embodiments, specific productivity as measured over a 24-hour fermentation (culture) period may be greater than 0.01, 0.05, 0.10, 0.20, 0.5, 1.0, 2.0, 3.0, 4.0, 5.0, 6.0, 7.0, 8.0, 9.0, 10.0, 11.0 or 12.0 grams of chemical product per gram DCW of microorganisms (based on the final DCW at the end of the 24-hour period).

[0223] In various aspects and embodiments of the present invention, there is a resulting substantial increase in microorganism specific productivity that advances the fermentation art and commercial economic feasibility of microbial chemical production, such as of 3-HP (but not limited thereto).

[0224] Stated in another manner, in various embodiments the specific productivity exceeds (is at least) 0.01 g chemical product/g DCW-hr, exceeds (is at least) 0.05 g chemical product/g DCW-hr, exceeds (is at least) 0.10 g chemical product/g DCW-hr, exceeds (is at least) 0.15 g chemical product/g DCW-hr, exceeds (is at least) 0.20 g chemical product/g DCW-hr, exceeds (is at least) 0.25 g chemical product/g DCW-hr, exceeds (is at least) 0.30 g chemical product/g DCW-hr, exceeds (is at least) 0.35 g chemical product/g DCW-hr, exceeds (is at least) 0.40 g chemical product/g DCW-hr, exceeds (is at least) 0.45 g chemical product/g DCW-hr, exceeds (is at least) 0.50 g chemical product/g DCW-hr, exceeds (is at least) 0.60 g chemical product/g DCW-hr.

[0225] More generally, based on various combinations of the genetic modifications described herein, optionally in combination with supplementations described herein, specific productivity values for 3-HP, and for other chemical products described herein, may exceed 0.01 g chemical product/g DCW-hr, may exceed 0.05 g chemical product/g DCW-hr, may exceed 0.10 g chemical product/g DCW-hr, may exceed 0.15 g chemical product/g DCW-hr, may exceed 0.20 g chemical product/g DCW-hr, may exceed 0.25 g chemical product/g DCW-hr, may exceed 0.30 g chemical product/g DCW-hr, may exceed 0.35 g chemical product/g DCW-hr, may exceed 0.40 g chemical product/g DCW-hr, may exceed 0.45 g chemical product/g DCW-hr, and may exceed 0.50 g or 0.60 chemical product/g DCW-hr. Such specific productivity may be assessed over a 2, 4, 6, 8, 12 or 24 hour period in a particular microbial chemical production event.

[0226] The improvements achieved by embodiments of the present invention may be determined by percentage increase in specific productivity, or by percentage increase in volumetric productivity, compared with an appropriate control microorganism lacking the particular genetic modification combinations taught herein (with or without the supplements taught herein, added to a vessel comprising the microorganism population). For particular embodiments and groups thereof, such specific productivity and/or volumetric productivity improvements is/are at least 10, at least 20, at least 30, at least 40, at least 50, at least 100, at least 200, at least 300, at least 400, and at least 500 percent over the respective specific productivity and/or volumetric productivity of such appropriate control microorganism.

[0227] The specific methods and teachings of the specification, and/or cited references that are incorporated by reference, may be incorporated into the examples. Also, production of 3-HP, or one of its downstream products such as described herein, may reach at least 1, at least 2, at least 5, at least 10, at least 20, at least 30, at least 40, and at least 50 g/liter titer in various embodiments.

[0228] The metrics may be applicable to any of the compositions, e.g., genetically modified microorganisms, methods, e.g., of producing 3-HP or other chemical products, and systems, e.g., fermentation systems utilizing the genetically modified microorganisms and/or methods disclosed herein.

[0229] It is appreciated that iterative improvements using the strategies and methods provided herein, and based on the discoveries of the interrelationships of the pathways and pathway portions, may lead to even greater 3-HP production and tolerance and more elevated 3-HP titers at the conclusion of a 3-HP bio-production event.

[0230] Any number of strategies may lead to development of a suitable modified enzyme suitable for use in a 3-HP production pathway. With regard to malonyl-CoA-reductase, one may utilize or modify an enzyme such as encoded by the sequences in the table immediately above, to achieve a suitable level of 3-HP production capability in a microorganism strain.

[0231] VIII. Increasing Tolerance to 3-HP

[0232] A complex comprising all or portions of a number of inter-related metabolic pathways has been identified, wherein genetic modification to increase enzymatic activities of enzymes of such complex, named the 3-HP Toleragenic Complex (“3HPTGC”), are demonstrated to increase microorganism tolerance to exposure to 3-HP. The 3HPTGC is described in WO 2010/011874, published Jan. 28, 2010, which is incorporated in the present application for its teachings of the 3HPTGC and combinations of genetic modifications related to 3HP production and tolerance based on the 3HPTGC and groups therein.

[0233] As described and detailed herein, the present invention broadly relates to alterations, using genetic modifications, and/or medium modulations (e.g, additions of enzymatic conversion products or other specific chemicals), to achieve desired results in microbe-based industrial bio-production methods, systems and compositions. As to the tolerance aspects, this invention flows from the discovery of the unexpected importance of the 3HPTPC which comprises certain metabolic pathway portions comprising enzymes whose increased activity (based on increasing copy numbers of nucleic acid sequences that encode there) correlates with increased tolerance of a microorganism to 3-HP.

[0234] Actual data and/or prophetic examples directed to alterations of the 3HPTGC are provided herein. These examples are intended to demonstrate the breadth of applicability (based on the large number of genomic elements related to the 3HPTGC that demonstrate increased 3-HP tolerance) and some specific approaches to achieve increased tolerance to 3-HP. Approaches may be combined to achieve additive or synergistic improvements in 3-HP tolerance, and may include alterations that are genetic or non-genetic (e.g., relating to system supplementation with particular chemicals, or general alterations to the industrial system). In addition, specific production strategies are disclosed and exemplified.

[0235] Thus, in addition to the above-described genetic modifications, directed to providing a 3-HP production pathway and to providing a nucleic acid sequence comprising and/or controlling a gene encoding an enoyl-ACP reductase that allows for control of enzymatic activity of the latter enzyme, and/or as described herein other modifications of the fatty acid synthetase system, in various embodiments one or more genetic modifications may be made to the genetically modified microorganism to increase its tolerance to 3-HP (or other chemical products).

[0236] Accordingly, in some embodiments of the present invention, a genetically modified microorganism may comprise at least one genetic modification to provide, complete, or enhance one or more 3-HP production pathways, at least one genetic modification to provide enoyl-ACP reductase enzymatic activity and/or other modifications of the fatty acid synthetase system that can be controlled so as to reduce such activity at a desired cell density, and at least one genetic modification of the 3HPTGC, or one, two, or three or more groups thereof, to increase tolerance of the genetically modified microorganism to 3-HP.

[0237] Accordingly, one aspect of the invention relates to a genetically modified microorganism comprising at least one genetic modification effective to increase 3-hydroxypropionic acid (“3-HP”) production, wherein the increased level of 3-HP production is greater than the level of 3-HP production in the wild-type microorganism, and at least one genetic modification of a metabolic complex identified herein as the 3-HP Toleragenic Complex (“3HPTGC”). Under certain conditions, such as culture in minimal media, the 3HPTGC genetic modification(s) allow the genetically modified microorganism to produce 3-HP under specific culture conditions such that 3-HP may accumulate to a relatively higher concentration without the toxic effects observed in unmodified microorganisms. The at least one genetic modification of a 3-HP production pathway may be to improve 3-HP accumulation and/or production of a 3-HP production pathway found in the wild-type microorganism, or may be to provide sufficient enzymatic conversions in a microorganism that normally does not synthesize 3-HP so that 3-HP is thus bio-produced. Methods of making such genetically modified microorganisms also are described and are part of this aspect of the invention.

[0238] Another aspect of the invention relates to a genetically modified microorganism comprising at least one genetic modification from two or more of the chorismate, threonine/homocysteine, polyamine synthesis, lysine synthesis, and nucleotide synthesis portions of the 3HPTGC. Non-limiting examples of multiple combinations exemplify the advantages of this aspect of the invention. Additional genetic modifications pertain to other portions of the 3HPTGC. Capability to bio-produce 3-HP may be added to some genetically modified microorganisms by appropriate genetic modification. Methods of identifying genetic modifications to provide a microorganism achieving an increased 3-HP tolerance, and microorganisms made by such methods, relate to this aspect of the invention.

[0239] Another aspect of the invention relates to a genetically modified microorganism that is able to produce 3-hydroxypropionic acid (“3-HP”), comprising at least one genetic modification to the 3HPTGC that increases enzymatic conversion at one or more enzymatic conversion steps of the 3HPTGC for the microorganism, and wherein the at least one genetic modification increases 3-HP tolerance of the genetically modified microorganism above the 3-HP tolerance of a control microorganism lacking the genetic modification. Methods of making such genetically modified microorganisms also are described and are part of this aspect of the invention.

[0240] Another aspect of the invention relates to a genetically modified microorganism comprising various core sets of specific genetic modification(s) of the 3HPTGC. In various embodiments this aspect may additionally comprise at least one genetic modification from one or more or two or more of the chorismate, threonine/homocysteine, polyamine synthesis, lysine synthesis, and nucleotide synthesis portions of the 3HPTGC. Methods of making such genetically modified microorganisms also are described and are part of this aspect of the invention.

[0241] Further, the invention includes methods of use to improve a microorganism's tolerance to 3-HP, which may be in a microorganism having 3-HP production capability (whether the latter is naturally occurring, enhanced and/or introduced by genetic modification).

[0242] Also, another aspect of the invention is directed to providing one or more supplements, which are substrates (i.e., reactants) and/or products of the 3HPTGC (collectively herein “products” noting that substrates of all but the initial conversion steps are also products of the 3HPTGC), to a culture of a microorganism to increase the effective tolerance of that microorganism to 3-HP.

[0243] Another aspect of the invention regards the genetic modification to introduce a genetic element that encodes a short polypeptide identified herein as IroK. The introduction of genetic elements encoding this short polypeptide has been demonstrated to improve 3-HP tolerance in E. coli under microaerobic conditions. This genetic modification may be combined with other genetic modifications and/or supplement additions of the invention.

[0244] As to methods of making 3-HP in accordance with the teachings of this invention, and to genetically modified microorganisms that make 3-HP, one or more genetic modifications may be provided to a microorganism to increase tolerance to 3-HP. That is, SEQ ID NOs:001 to 189 are incorporated into this section, SEQ ID NOs:190 to 603 are provided as nucleic acid sequences (gene, DNA) and encoded amino acid sequences (proteins) of the E. coli 3HPTGC, and SEQ ID NOs:604 to 766 are provided as sequences of the nucleic acid sequences of the Saccharomyces cerevisiae 3HPTGC.

[0245] Moreover, a particular genetic modification to increase expression of carbonic anhydrase (for example, E. coli's cynT SEQ ID NO:337 for DNA and SEQ ID NO:544 for protein sequences), may act in a dual function manner to advantageously improve both 3-HP production and 3-HP tolerance. This is particularly the case when malonyl-CoA reductase is provided for 3-HP production. FIG. 1 depicts a production pathway from malonyl-CoA to 3-HP comprising a bi-functional malonyl-CoA reductase, and other enzymatic conversions and pathways described herein. Carbonic anhydrase is not meant to be limiting. For instance, in E. coli a carbonic anhydrase 2 is known, variously designated as can and yadF, and use of genetic modifications in embodiments of the present invention may use this or other genes and their encoded enzymes. The sequences for can are provided as SEQ ID NO: 767 (EG12319 can “carbonic anhydrase 2 monomer” (complement (142670 . . . 142008)) Escherichia coli K-12 substr. MG1655) and SEQ ID NO: 768 (EG12319-MONOMER carbonic anhydrase 2 monomer (complement(142670 . . . 142008)) Escherichia coli K-12 substr. MG1655).

[0246] Also, it is appreciated that genetic modifications to increase 3-HP tolerance may be further classified by genetic modifications made along particular respective portions of the 3HPTGC. For example, genetic modifications may be made to polynucleotides that encode polypeptides that catalyze enzymatic reactions along specific portions of the of the 3HPTGC and so are expected to increase production of, respectively, aromatic amino acids (tyr and phe), tryptophan (trp), ubiquinone-8, menaquinone, enterobactin, tetrahydrofolate (see respective enzymatic conversions of Group A sheet (and inputs thereto)), one or more of the polar uncharged amino acids (gly, ser, cys, homocysteine), isoleucine, methionine (see respective enzymatic conversions of Group B sheet (and inputs thereto)), glutamine, arginine, putrescine, spermidine, aminopropylcadaverine (see see respective enzymatic conversions of Group C sheet (and inputs thereto)), cadaverine (see respective enzymatic conversions of Group D sheet (and input thereto)), inosine-5-phosphate, xanthosine-5-phosphate, adenylo-succinate, orotidine-5′-phosphate, and any of the mono-, di-, and tri-phosphate nucleosides (i.e., adenosine, guanosine, cytosine, uridine) obtainable there from (see respective enzymatic conversions of Group E sheet (and input thereto)), glutamate, succinate, succinate semialdehyde, oxaloacetate, and aspartate (see respective enzymatic conversions of Group F sheet, including reactions shown along dashed lines), such that 3-HP tolerance thereby increases as a result of such genetic modification(s). Any portion or sub-portion may be selected for genetic modification(s) to increase 3-HP tolerance in a selected microorganism species.

[0247] As indicated, in various embodiments the combinations of genetic modifications as described in this section are practiced in combination with aspects of the invention pertaining to modulation of the fatty acid synthase system.

[0248] VIIIA. SCALES Technique

[0249] As described in WO 2010/011874, published Jan. 28, 2010, to obtain genetic information, initial 3-HP-related fitness data was obtained by evaluation of fitness of clones from a genomic-library population using the SCALES technique. These clones were grown in a selective environment imposed by elevated concentrations of 3-HP, shown to be a reliable test of 3-HP tolerance.

[0250] More particularly, to obtain data potentially useful to identify genetic elements relevant to increased 3-HP tolerance, an initial population of five representative E. coli K12 genomic libraries was produced by methods known to those skilled in the art. The five libraries respectively comprised 500, 1000, 2000, 4000, 8000 base pair (“bp”) inserts of E. coli K12 genetic material. Each of these libraries, essentially comprising the entire E. coli K12 genome, was respectively transformed into MACH1™-T1® E. coli cells and cultured to mid-exponential phase corresponding to microaerobic conditions (OD₆₀₀˜0.2). Batch transfer times were variable and were adjusted as needed to avoid a nutrient limited selection environment (i.e., to avoid the cultures from entering stationary phase). Although not meant to be limiting as to alternative approaches, selection in the presence of 3-HP was carried out over 8 serial transfer batches with a decreasing gradient of 3-HP over 60 hours. More particularly, the 3-HP concentrations were 20 g 3-HP/L for serial batches 1 and 2, 15 g 3-HP/L for serial batches 3 and 4, 10 g 3-HP/L for serial batches 5 and 6, and 5 g 3-HP/L for serial batches 7 and 8. For serial batches 7 and 8 the culture media was replaced as the culture approached stationary phase to avoid nutrient limitations.

[0251] Samples were taken during and at the culmination of each batch in the selection, and were subjected to microarray analysis that identified signal strengths. The individual standard laboratory methods for preparing libraries, transformation of cell cultures, and other standard laboratory methods used for the SCALES technique prior to array and data analyses are well-known in the art, such as supported by methods taught in Sambrook and Russell, Molecular Cloning: A Laboratory Manual, Third Edition 2001 (volumes 1-3), Cold Spring Harbor Laboratory Press, Cold Spring Harbor, N.Y. (hereinafter, Sambrook and Russell, 2001). Aspects of individual methods also are discussed in greater detail in the Examples and in the SCALES technique patent applications, U.S. Patent Publication No. 2006/0084098A1, filed Sep. 20, 2005, entitled: “Mixed-Library Parallel Gene Mapping Quantitation Microarray Technique for Genome Wide Identification of Trait Conferring Genes” (hereinafter, the “SCALES Technique”), which is incorporated herein by reference for teaching additional details of this technique.

[0252] Microarray technology also is well-known in the art (see, e.g. <<www.affymetrix.com>>). To obtain data of which clones were more prevalent at different exposure periods to 3-HP, Affymetrix E. coli Antisense Gene Chip arrays (Affymetrix, Santa Clara, Calif.) were handled and scanned according to the E. coli expression protocol from Affymetrix producing affymetrix.cel files. A strong microarray signal after a given exposure to 3-HP indicates that the genetic sequence introduced by the plasmid comprising this genetic sequence confers 3-HP tolerance. These clones can be identified by numerous microarray analyses known in the art.

[0253] Also, for the purposes of incorporation by reference as applied in the United States, “A genomics approach to improve the analysis and design of strain selections,” T. E. Warnecke et al., Metabolic Engineering 10 (2008)154-165, is incorporated by reference herein for its additional specific teachings that demonstrate that SCALEs fitness data correlates with and can be used as a surrogate of increased tolerance to 3-HP. This conclusion is based on the standard use of a receiver operator characteristic curve (ROC) curve. ROC analysis is routinely used in the medical diagnostic field to evaluate the correlation for a diagnostic test to the actual presence or absence of a disease. Currently diagnostic tests used through the world in medical applications that perform well in a ROC analysis are routinely used to identify the absence or presence of a disease. This analysis was adapted to evaluate the sensitivity and specificity of different microbial growth based selections resulting in fitness values as reliable tests for 3-HP tolerance. In particular a growth based selection using serial batch cultures with decreasing levels of 3-HP was identified as a sensitive and specific test for 3-HP tolerance. As a result clones in this selection with a fitness metric greater than a cutoff of 0 are identified as clones conferring tolerance to 3-HP.

[0254] The following table lists some of the genes (introduced by vectors of the libraries) that were shown to have elevated fitness values, shown herein to confer tolerance to 3-HP.

TABLE 3
SCALES Fitness Data

| | Cumulative | | Cumulative | | Cumulative |
|---|---|---|---|---|---|
| Gene | Fitness | Gene | Fitness | Gene | Fitness |
| aceE | 11.2 | cysM | 26.63 | ilvC | 2.61 |
| aceF | 8.39 | eno | 6.98 | ilvD | 1.6 |
| ackA | 2.36 | entA | 1.58 | ilvE | 0.94 |
| acnA | 3.58 | entB | 0.93 | ilvH | 1.18 |
| acnB | 3.18 | entC | 1.26 | ilvI | 1.77 |
| adhE | 3.68 | entD | 1 | ilvM | 1.02 |
| adiA | 1.95 | entE | 1.03 | ilvN | 1.53 |
| adk | 2.18 | entF | 1.03 | kbl | 3.11 |
| aldA | 1.83 | fbaA | 2.87 | itaE | 1.14 |
| argA | 3.94 | fbaB | 2.28 | lysC | 1.97 |
| argB | 8.94 | folA | 15.07 | malY | 2.58 |
| argC | 4.02 | folB | 0.57 | menA | 3.2 |
| argD | 2.87 | folC | 1.72 | menB | 0.86 |
| argE | 2.15 | folD | 8.54 | menC | 0.92 |
| argF | 2.04 | folE | 1.08 | menD | 2.33 |
| argG | 2.62 | folK | 1.73 | menE | 3.06 |
| argH | 8.06 | folP | 2.45 | menF | 3.09 |
| argI | 4.06 | fumA | 3.84 | metA | 1.56 |
| aroA | 2.31 | fumB | 2.51 | metB | 1.83 |
| aroB | 8.68 | fumC | 1.86 | metC | 6.08 |
| aroC | 1.95 | gabD | 1.83 | metE | 2.46 |
| aroD | 1.93 | gabT | 1.41 | metH | 2.44 |
| aroE | 8.44 | gapA | 3.03 | metK | 3.35 |
| aroF | 6.24 | gcvH | 5.9 | metL | 2.97 |
| aroG | 2.26 | gcvP | 7.91 | mhpF | 1.44 |
| aroH | 1.61 | gcvT | 1.78 | ndk | 1.66 |
| aroK | 4 | gdhA | 2.84 | nrdA | 2.01 |
| aroL | 1.63 | gldA | 2.08 | nrdB | 1.81 |
| asd | 2.96 | glk | 1.17 | nrdD | 2.79 |
| aspC | 2.82 | glnA | 1.34 | nrdE | 1.91 |
| astC | 2.29 | gltA | 6.37 | nrdF | 1.25 |
| carA | 0.89 | glyA | 5.06 | pabA | 2.33 |
| carB | 1.17 | gmk | 1.86 | pabB | 1.92 |
| cynS | 4.83 | gnd | 1.69 | thrA | 2.79 |
| cysE | 1.19 | gpmA | 2.01 | thrB | 0.96 |
| cysK | 2.41 | guaA | 3.65 | thrC | 1.51 |
| pabC | 1.75 | guaB | 2.63 | pheA | 6.7 |
| pfkA | 1.78 | ilvA | 12.21 | pta | 2.7 |
| pflB | 2.83 | ilvB | 2.7 | purA | 5.1 |
| purB | 3.65 | rpiA | 1.85 | trpC | 1.56 |
| purC | 1.78 | sdaA | 1.62 | trpD | 2.48 |
| purD | 1.32 | sdaB | 1.22 | trpE | 2.85 |
| purE | 1.82 | serA | 3.11 | tynA | 2.36 |
| purF | 2.04 | serB | 2.46 | tyrA | 9.1 |
| purH | 1.66 | serC | 2.15 | tyrB | 1.49 |
| purK | 2.65 | speA | 2.09 | ubiA | 1.51 |
| purL | 4.83 | speB | 1.66 | ubiB | 2.09 |
| purM | 3.13 | speC | 1.52 | ubiC | 2.4 |
| purN | 2.94 | speD | 3.43 | ubiD | 0.91 |
| purT | 3.73 | talA | 1.24 | ubiE | 1.02 |
| puuE | 1.53 | talB | 4.78 | ubiF | 1.78 |
| pyrB | 6.36 | tdcB | 1.87 | ubiG | 3.17 |
| pyrC | 14.48 | tdcD | 1.64 | ubiH | 5.35 |
| pyrD | 2.26 | tdcE | 1.16 | ubiX | 1.72 |
| pyrE | 1.03 | tdh | 1.38 | ydcW | 0.89 |
| pyrF | 1.38 | tktA | 1.89 | ydiB | 0.87 |
| pyrG | 2.23 | tktB | 1.21 | ygjG | 2.51 |
| pyrH | 1.78 | trpA | 2.45 | yneI/sad | 4.18 |
| pyrI | 0.83 | trpB | 1.93 | | |
| rpe | 2.06 | | | | |

[0255] VIIIB. Analysis of the SCALES Technique

[0256] Also as described in WO 2010/011874, published Jan. 28, 2010, analysis of the 3-HP tolerance SCALEs data has led to an understanding of interrelationships among various identified pathways and portions thereof. It is noted that the 3HPTGC, in its entirety, was deduced from interrelationships between genes having elevated fitness values. Not every enzyme of the 3HPTGC was shown in the SCALES data to have positive fitness values. This may be attributed to certain deficiencies in the commercial arrays used to obtain that SCALES data. Accordingly, some members of the E. coli 3HPTGC not so derived from the SCALES genetic element data were deduced to fill in the 3HPTGC. However, it is noted that most of the enzymes in the 3HPTGC do have positive fitness values, and the overall fitness data in combination with the supplements and genetic modifications data, provided herein, prove the validity of the deduction and the overall significance of the 3HPTGC being related to 3-HP tolerance.

[0257] As described herein, the 3HPTGC is divided into an “upper section” comprising the glycolysis pathway, the tricarboxylic acid cycle, the glyoxylate pathway, and a portion of the pentose phosphate pathway, and a “lower section” comprising all or portions of the chorismate super-pathway, the carbamoyl-phosphate to carbamate pathway, the threonine/homocysteine super-pathway, the nucleotide synthesis pathway, and the polyamine synthesis pathway.

[0258] In various embodiments microorganisms are genetically modified to affect one or more enzymatic activities of the 3HPTGC so that an elevated tolerance to 3-HP may be achieved, such as in industrial systems comprising microbial 3-HP biosynthetic activity. Also, genetic modifications may be made to provide and/or improve one or more 3-HP biosynthesis pathways in microorganisms comprising one or more genetic modifications for the 3-HP toleragenic complex, thus providing for increased 3-HP production. These latter recombinant microorganisms may be referred to as 3-HP-syntha-toleragenic recombinant microorganisms (“3HPSATG” recombinant microorganisms).

[0259] The 3HPTGC for E. coli is disclosed in FIG. 9A, sheets 1-7 (a guide for positioning these sheets to view the entire depicted 3HPTGC is provided in sheet 1 of FIG. 9A). As may be observed in FIG. 9, sheets 1-7, the 3HPTGC comprises all or various indicated portions of the following: the chorismate super-pathway, the carbamoyl-phosphate to carbamate pathway, the threonine/homocysteine super-pathway; a portion of the pentose phosphate pathway; the nucleotide synthesis pathway; the glycolysis/tricarboxylic acid cycle/glyoxylate bypass super-pathway; and the polyamine synthesis pathway. It is noted that the chorismate pathway and the threonine pathway are identified as super-pathways since they respectively encompass a number of smaller known pathways. However, the entire 3HPTGC comprises these as well as other pathways, or portions thereof, that normally are not associated with either the chorismate super-pathway or the threonine/homocysteine super-pathway.

[0260] More particularly, FIG. 9A, comprising sheets 1-7, is subdivided into the lower section, which is further subdivided into Groups A-E and the upper section, identified simply as Group F. The lower section groups are identified as follows: Group A, or “chorismate,” comprising the indicated, major portion of the chorismate super-pathway (sheet 3); Group B, or “threonine/homocysteine,” comprising the indicated portion of the threonine/homocysteine pathway (sheet 7); Group C, or “polyamine synthesis,” comprising the indicated portion of the polyamine pathway, which includes arginine synthesis steps and also the carbamoyl-phosphate to carbamate pathway (sheet 5); Group D, or “lysine synthesis,” comprising the indicated portion of the lysine synthesis pathway (sheet 6); Group E, or “nucleotide synthesis,” comprising the indicated portions of nucleotide synthesis pathways (sheet 4). Group F (sheet 2) comprises the upper section of the 3HPTGC and includes the glycolysis pathway, the tricarboxylic acid cycle, and the glyoxylate bypass pathway, and the indicated portions of the pentose phosphate pathway.

[0261] It is noted that particular genes are identified at enzymatic conversion steps of the 3HPTGC in FIG. 9A, sheets 1-7. These genes are for E. coli strain K12, substrain MG1655; nucleic acid and corresponding amino acid sequences of these are available at <<http://www.ncbi.nlm.nih.gov/sites/entrez>>, and alternatively at <<www.ecocyc.org>>. As is known to one skilled in the art, some genes may be found on a chromosome within an operon, under the control of a single promoter, or by other interrelationships. When a nucleic acid sequence herein is referred to as a combination, such as sucCD or cynTS, by this is meant that the nucleic acid sequence comprises, respectively, both sucC and sucD, and both cynT and cynS. Additional control and other genetic elements may also be in such nucleic acid sequences, which may be collectively referred to as “genetic elements” when added in a genetic modification, and which is intended to include a genetic modification that adds a single gene.

[0262] However, similarly functioning genes are readily found in different species and strains, encoding enzymes having the same function as shown in FIG. 9A, sheets 1-7, and such genes, and the 3HPTGCs of such other species and strains may be utilized in the practice of the invention. This can be achieved by the following methods, which are not meant to be limiting.

[0263] For the set of genes within the 3HPTGC of E. coli, protein sequences were obtained from NCBI. To identify similarly functioning genes in S. cerevisiae, a pathway comparison tool at <<www.biocyc.org>> was utilized using the genes identified in the E. coli 3HPTGC. For B. subtilis, this annotated approach was used in part, and enzymes or pathway portions not obtained by that approach were obtained by a homology comparison approach. For the homology approach, a local blast (<<www.ncbi.nlm.nih.gov/Tools/>>) (blastp) comparison using the selected set of E. coli proteins and Bacillus protein sequence (4096 sequences) was performed using different thresholds (<<www.ncbi.nlm.nih.gov/genomes/lproks.cgi>>). Using the homology information (homology matches having E⁻¹⁰ or less E-value) the remaining genes and enzymes were identified for the 3HPTGC for Bacillus subtilis.

[0264] Also, the latter homology approach was used for Cupriavidus necator, the following table provides some examples of the homology relationships for genetic elements of C. necator that have a demonstrated homology to E. coli genes that encode enzymes known to catalyze enzymatic conversion steps of the 3HPTGC. This is based on the criterion of the homologous sequences having an E-value less than E⁻¹⁰. The table provides only a few of the many homologies (over 850) obtained by the comparison. Not all of the homologous sequences in C. necator are expected to encode a desired enzyme suitable for an enzymatic conversion step of the 3HPTGC for C. necator. However, through one or more of a combination of selection of genetic elements known to encode desired enzymatic reactions, the most relevant genetic elements are selected for the 3HPTGC for this species.

TABLE 4
Homology Relationships for Genetic Elements of C. necator

| E. coli | | | C. necator | | |
|---|---|---|---|---|---|
| Gene | | E. coli enzyme | Gene | C. necator | C. necator Gene |
| Symbol | E. coli enzyme product | substrate | Symbol | E-value | Product |
| Acee | Pyruvate | acetyl-coA | aceE | 0 | pyruvate |
| | | | | | dehydrogenase |
| | | | | | subunit E1 |
| Acee | Pyruvate | acetyl-coA | aceE | 0 | pyruvate |
| | | | | | dehydrogenase |
| | | | | | subunit E1 |
| Acee | Pyruvate | acetyl-coA | aceE | 0 | 2-oxoacid |
| | | | | | dehydrogenase |
| | | | | | subunit E1 |
| Acef | gi\|16128108\|ref\|NP_414 | pyruvate | pdhB | 2.00E−102 | dihydrolipoamide |
| | 657.1\| | | | | acetyltransferase |
| acef | gi\|16128108\|ref\|NP_414 | pyruvate | pdhB | 2.00E−25 | dihydrolipoamide |
| | 657.1\| | | | | acetyltransferase |
| Acef | Pyruvate | acetyl-coA | pdhB | 2.00E−22 | dihydrolipoamide |
| | | | | | acetyltransferase |
| Acef | Pyruvate | acetyl-coA | pdhB | 1.00E−10 | dihydrolipoamide |
| | | | | | acetyltransferase |
| Acef | Pyruvate | acetyl-coA | pdhL | 6.00E−11 | dihydrolipoamide |
| | | | | | dehydrogenase (E3) |
| | | | | | component ofpyruvate |
| | | | | | dehydrogenase |
| Acef | Pyruvate | acetyl-coA | pdhL | 2.00E−09 | dihydrolipoamide |
| | | | | | dehydrogenase (E3) |
| | | | | | component ofpyruvate |
| | | | | | dehydrogenase |
| Acef | Pyruvate | acetyl-coA | pdhL | 8.00E−08 | dihydrolipoamide |
| | | | | | dehydrogenase (E3) |
| | | | | | component ofpyruvate |
| | | | | | dehydrogenase |
| Acef | Pyruvate | acetyl-coA | odhB | 9.00E−36 | dihydrolipoamide |
| | | | | | acetyltransferase |
| Acef | Pyruvate | acetyl-coA | bkdB | 1.00E−30 | branched-chain alpha- |
| | | | | | keto acid |
| | | | | | dehydrogenase |
| | | | | | subunit E2 |
| Acef | pyruvate | acetyl-coA | bkdB | 1.00E−07 | branched-chain alpha- |
| | | | | | keto acid |
| | | | | | dehydrogenase |
| | | | | | subunit E2 |
| Acef | Pyruvate | acetyl-coA | bkdB | 2.00E−07 | branched-chain alpha- |
| | | | | | keto acid |
| | | | | | dehydrogenase |
| | | | | | subunit E2 |
| Acna | gi\|16129237\|ref\|NP_415 | citrate | leuC1 | 2.00E−19 | isopropylmalate |
| | 792.1\| | | | | isomerase large |
| | | | | | subunit |
| Acna | gi\|16129237\|ref\|NP_415 | citrate | leuC2 | 7.00E−22 | isopropylmalate |
| | 792.1\| | | | | isomerase large |
| | | | | | subunit |
| Acna | gi\|16129237\|ref\|NP_415 | citrate | acnM | 0 | aconitate hydratase |
| | 792.1\| | | | | |
| Acna | gi\|16129237\|ref\|NP_415 | citrate | leuC3 | 6.00E−20 | isopropylmalate |
| | 792.1\| | | | | isomerase large |
| | | | | | subunit |
| Acna | Citrate | cis-aconitate | acnA | 0 | aconitate hydratase |
| Acna | Citrate | cis-aconitate | leuC4 | 6.00E−14 | 3-isopropylmalate |
| | | | | | dehydratase large |
| | | | | | subunit |
| Acna | Citrate | cis-aconitate | leuC5 | 1.00E−12 | isopropylmalate |
| | | | | | isomerase large |
| | | | | | subunit |
| Ytjc | gi\|16132212\|ref\|NP_418 | 3- | pgam2 | 3.00E−25 | phosphoglycerate |
| | 812.1\| | phosphoglycerate | | | mutase 2 protein |
| ytjc | 3-phosphoglycerate | 2- | pgam2 | 3.00E−25 | phosphoglycerate |
| | | phosphoglycerate | | | mutase 2 protein |
| Zwf | gi\|16129805\|ref\|NP_416 | glucose-6- | zwf1 | 2.00E−132 | glucose-6-phosphate |
| | 366.1\| | phosphate | | | 1-dehydrogenase |
| Zwf | glucose-6-phosphate | glucono- | zwf2 | 7.00E−126 | glucose-6-phosphate |
| | | lactone-6- | | | 1-dehydrogenase |
| | | phosphate | | | |
| Zwf | glucose-6-phosphate | glucono- | zwf3 | 8.00E−130 | glucose-6-phosphate |
| | | lactone-6- | | | 1-dehydrogenase |
| | | phosphate | | | |

[0265] FIG. 9B, sheets 1-7, shows the 3HPTGC for Bacillus subtilis, FIG. 9C, sheets 1-7, shows the 3HPTGC for the yeast Saccharomyces cerevisiae and FIG. 9D, sheets 1-7, shows the 3HPTGC for Cupriavidus necator. Enzyme names for the latter are shown, along with an indication of the quantity of homologous sequences meeting the criterion of having an E-value less than E⁻¹⁰ when compared against an E. coli enzyme known to catalyze a desired 3HPTGC enzymatic conversion step.

[0266] Based on either of the above approaches, and the present existence of or relative ease and low cost of obtaining genomic information of a given microorganism species, one or both of the above approaches may be employed to identify relevant genes and enzymes in a selected microorganism species (for which its genomic sequence is known or has been obtained), evaluate the relative improvements in 3-HP tolerance of selected genetic modifications of such homologously matched and identified genes, and thereby produce a recombinant selected microorganism comprising improved tolerance to 3-HP.

[0267] Additionally, it is appreciated that alternative pathways in various microorganisms may yield products of the 3HPTGC, the increased production or presence of which are demonstrated herein to result in increased 3-HP tolerance. For example, in yeast species there are alternative pathways to lysine, a product within Group D. Accordingly, alterations of such alternative pathways are within the scope of the invention for such microorganism species otherwise falling within the scope of the relevant claim(s). Thus, in various embodiments the invention is not limited to the specific pathways depicted in FIGS. 9A-D. That is, various pathways, and enzymes thereof, that yield the products shown in FIGS. 9A-D may be considered within the scope of the invention.

[0268] It is noted that when two or more genes are shown for a particular enzymatic conversion step, these may be components of a single multi-enzyme complex, or may represent alternative enzymes that have different control factors that control them, or are induced differently. Also, as is clear to one skilled in the art, the major reactants (i.e., substrates) and products are shown for the enzymatic conversion steps. This is to minimize details on an already-crowded figure. For example, electron carriers and energy transfer molecules, such as NAD(P)(H) and ADP/ATP, are not shown, and these (and other small-molecule reactants not shown in the 3HPTGC figures) are not considered “products” of the 3HPTGC as that term is used herein. Also, for at least two steps (dihydroneopterin phosphate to 7,8-dihydro-D-neopterin and 1,4-dihydroxy-2-naphthoyl-CoA to 1,4-dihydroxy-2-naphthoate) no enzyme is shown because no enzyme has been known to be identified for this step at the time of filing. Accordingly, in some embodiments the 3HPTGC is understood and/or taken to exclude enzymes, nucleic acid sequences, and the like, for these steps. Also, as discussed herein, also included within the scope of the invention are nucleic acid sequence variants encoding identified enzymatic functional variants of any of the enzymes of the 3HPTGC or a related complex or portion thereof as set forth herein, and their use in constructs, methods, and systems claimed herein.

[0269] Some fitness data provided in Table 3 is not represented in the figures of the 3HPTGC but nonetheless is considered to support genetic modification(s) and/or supplementation to improve 3-HP tolerance. For example, the relatively elevated fitness scores for gcvH, gcvP and gcvT, related to the glycine cleavage system. These enzymes are involved in the glycine/5,10-methylene-tetrahydrofolate (“5,10 mTHF”) conversion pathway, depicted in FIG. 10. In the direction shown in FIG. 10, the three enzymatically catalyzed reactions result in decarboxylation of glycine (a 3HPTGC product, see FIG. 9A, sheet 4), production of 5,10-methylene-THF from tetrahyrdofolate (“THF”), and production of NADH from NAD⁺. The 5,10-methylene-THF product of this complex is a reactant in enzymatically catalyzed reactions that are part of the following: folate polyglutamylation; panthothenate biosynthesis; formylTHF biosynthesis; and de novo biosynthesis of pyrimidine deoxyribonucleotides. Overall, genetic modifications in a microorganism directed to the enzymes, and enzymatic catalytic steps thereof, shown in Table 3 but not represented in FIG. 9, sheets 1-7 are considered part of the invention (as are their functional equivalents for other species), wherein such genetic modifications result in an increase in 3-HP tolerance.

[0270] VIIIC. Genetic Modifications and Supplementations of the 3HPTCG

[0271] For various embodiments of the invention the genetic modifications to any pathways and pathway portions of the 3HPTCG and any of the 3-HP bio-production pathways may be described to include various genetic manipulations, including those directed to change regulation of, and therefore ultimate activity of, an enzyme, or enzymatic activity of an enzyme identified in any of the respective pathways. Such genetic modifications may be directed to transcriptional, translational, and post-translational modifications that result in a change of enzyme activity and/or overall enzymatic conversion rate under selected and/or identified culture conditions, and/or to provision of additional nucleic acid sequences (as provided in some of the Examples) so as to increase copy number and/or mutants of an enzyme of the 3HPTGC.

[0272] Specific methodologies and approaches to achieve such genetic modification are well known to one skilled in the art, and include, but are not limited to: increasing expression of an endogenous genetic element; decreasing functionality of a repressor gene; introducing a heterologous genetic element; increasing copy number of a nucleic acid sequence encoding a polypeptide catalyzing an enzymatic conversion step of the 3HPTGC; mutating a genetic element to provide a mutated protein to increase specific enzymatic activity; over-expressing; under-expressing; over-expressing a chaperone; knocking out a protease; altering or modifying feedback inhibition; providing an enzyme variant comprising one or more of an impaired binding site for a repressor and/or competitive inhibitor; knocking out a repressor gene; evolution, selection and/or other approaches to improve mRNA stability. Random mutagenesis may be practiced to provide genetic modifications of the 3HPTGC that may fall into any of these or other stated approaches. The genetic modifications further broadly fall into additions (including insertions), deletions (such as by a mutation) and substitutions of one or more nucleic acids in a nucleic acid of interest. In various embodiments a genetic modification results in improved enzymatic specific activity and/or turnover number of an enzyme. Without being limited, changes may be measured by one or more of the following: K_{M}; K_{cat}; and K_{avidity}.

[0273] Such genetic modifications overall are directed to increase enzymatic conversion at at least one enzymatic conversion step of the 3HPTGC so as to increase 3-HP tolerance of a microorganism so modified. Also, the enzymatic conversion steps shown in FIGS. 9A-D may be catalyzed by enzymes that are readily identified by one skilled in the art, such as by searching for the enzyme name corresponding to the gene name at a particular enzymatic conversion step in FIGS. 9A-D, and then identifying enzymes, such as in other species, having the same name and function. The latter would be able to convert the respective reactant(s) to the respective product(s) for that enzymatic conversion step. Public database sites, such as <<www.metacyc.org>>, <<www.ecocyc.org>>, <<www.biocyc.org>>, and <<www.ncbi.gov>>, have associated tools to identify such analogous enzymes.

[0274] Also, although the MIC analysis is used frequently herein as an endpoint to indicate differences in microorganism growth when placed in various 3-HP concentrations for a specified time, this is by no means considered to be the only suitable metric to determine a difference, such as an improvement, in microorganism tolerance based on aspects of the invention. Without being limiting, other suitable measurement approaches may include growth rate determination, lag time determination, changes in optical density of cultures at specified culture durations, number of doublings of a population in a given time period and, for microorganisms that comprise 3-HP production capability, overall 3-HP production in a culture system in which 3-HP accumulates to a level inhibitory to a control microorganism lacking genetic modifications that increase enzymatic conversion at one or more enzymatic conversion steps of the 3HPTGC. This may result in increased productivities, yields or titers.

[0275] It is generally appreciated that a useful metric to assess increases in 3-HP tolerance can be related to a microorganism's or a microorganism culture's ability to grow while exposed to 3-HP over a specified period of time. This can be determined by various quantitative and/or qualitative analyses and endpoints, particularly by comparison to an appropriate control that lacks the 3-HP tolerance-related genetic modification(s) and/or supplements as disclosed and discussed herein. Time periods for such assessments may be, but are not limited to: 12 hours; 24 hours; 48 hours; 72 hours; 96 hours; and periods exceeding 96 hours. Varying exposure concentrations of 3-HP may be assessed to more clearly identify a 3-HP tolerance improvement. The following paragraphs provide non-limiting examples of approaches that may be used to demonstrate differences in a microorganism's ability to grow and/or survive in the presence of 3-HP in its culture system when teachings of the present invention are applied to the microorganism and/or the culture system.

[0276] FIGS. 15A-O provide data from various control microorganism responses to different 3-HP concentrations. The data in these figures is shown variously as changes in maximum growth rate (μₘₐₓ), changes in optical density (“OD”), and relative doubling times over a given period, here 24 hours.

[0277] Determination of growth rates, lag times and maximum growth rates are commonly used analyses to develop comparative metrics. FIGS. 15A, 15D, 15G, 15J, and 15M demonstrate changes in maximum growth rates over a 24-hour test period for the indicated species under the indicated aerobic or anaerobic test conditions. When representing this data for a range of concentrations of a chemical of interest that is believed toxic and/or inhibitory to growth, this representation is termed a “toleragram” herein. Here, growth toleragrams are generated by measuring the specific growth rates of microorganisms subjected to growth conditions including varying amounts of 3-HP.

[0278] Further, FIG. 15P compares the growth toleragrams of a control microorganism culture with a microorganism in which genetic modification was made to increase expression of cynTS (in Group C of the 3HPTGC). The curve for a cynTS genetic modification in E. coli shows increasing maximum growth rate with increasing 3-HP concentration over a 24-hour evaluation period for each 3-HP concentration. This provides a qualitative visually observable difference. However, the greater area under the curve for the cynTS genetic modification affords a quantitative difference as well, which may be used for comparative purposes with other genetic modifications intended to improve 3-HP tolerance. Evaluation of such curves may lead to more effective identification of genetic modifications and/or supplements, and combinations thereof.

[0279] FIGS. 15B, 15E, 15H, 15K, and 15N demonstrate a control microorganism responses to different 3-HP concentrations wherein optical density (“OD,” measured at 600 nanometers) at 24-hours is the metric used. OD600 is a conventional measure of cell density in a microorganism culture. For E. coli under aerobic condition, FIG. 15B demonstrates a dramatic reduction in cell density at 24 hours starting at 30 g/L 3-HP. FIG. 15D shows a relatively sharper and earlier drop for E. coli under anaerobic conditions.

[0280] FIGS. 15C, 15F, 15I, 15L, and 15O demonstrate control microorganism responses to different 3-HP concentrations wherein the number of cell doublings during the 24-hour period are displayed.

[0281] The above is intended as a non-limiting description of various ways to assess 3-HP tolerance improvements. Generally, demonstrable improvements in growth and/or survival are viewed as ways to assess an increase in tolerance, such as to 3-HP.

[0282] Embodiments of the present invention may result from introduction of an expression vector into a host microorganism, wherein the expression vector contains a nucleic acid sequence coding for an enzyme that is, or is not, normally found in a host microorganism. With reference to the host microorganism's genome prior to the introduction of the heterologous nucleic acid sequence, then, the nucleic acid sequence that codes for the enzyme is heterologous (whether or not the heterologous nucleic acid sequence is introduced into that genome).

[0283] Generally, it is within the scope of the invention to provide one or more genetic modifications to increase a recombinant microorganism's tolerance to 3-HP by any one or more of the approaches described herein. Thus, within the scope of any of the above-described alternatives and embodiments thereof are the composition results of respective methods, that is, genetically modified microorganisms that comprise the one or more, two or more, three or more, etc. genetic modifications referred to toward obtaining increased tolerance to 3-HP.

[0284] Also, it is within the scope of the invention to provide, in a suitable culture vessel comprising a selected microorganism, one or more supplements that are intermediates or end products (collectively, “products”) of the 3HPTGC. Table 5 recites a non-limiting listing of supplements that may be added in a culture vessel comprising a genetically modified microorganism comprising one or more genetic modifications to the 3HPTGC and/or 3-HP production pathways. For example, not to be limiting, one or more of lysine, methionine, and bicarbonate may be provided. Such supplement additions may be combined with genetic modifications, as described herein, of the selected microorganism.

TABLE 5

| | | TGC | Concentration, | |
|---|---|---|---|---|
| Supplement | Source | Group | g/L | Note |
| Tyrosine | Sigma, St. Louis, MO | A | 0.036 | dissolve in 0.01 KOH, |
| | | | | pH final to 7 |
| Phenylalanine | Sigma, St. Louis, MO | A | 0.0664 | |
| Tryptophan | Sigma, St. Louis, MO | A | 0.0208 | |
| Shikimate | Sigma, St. Louis, MO | A | 0.1 | |
| p-aminobenzoate | MP Biomedicals, Aurora, | A | 0.069 | |
| | OH | | | |
| Dihydroxybenzoate | Sigma, St. Louis, MO | A | 0.077 | |
| Tetrahydrofolate | Sigma, St. Louis, MO | A | 0.015 | 10% DMSO |
| Homocysteine | MP Biomedicals, Aurora, | B | 0.008 | |
| | OH | | | |
| Isoleucine | Sigma, St. Louis, MO | B | 0.0052 | |
| Serine | Sigma, St. Louis, MO | B | 1.05 | |
| Glycine | Fisher Scientific, Fair | B | 0.06 | |
| | Lawn, NJ | | | |
| Methionine | Sigma, St. Louis, MO | B | 0.03 | |
| Threonine | Sigma, St. Louis, MO | B | 0.0476 | |
| 2-oxobutyrate | Fluka Biochemika, | B | 0.051 | |
| | Hungary | | | |
| Homoserine | Acros Organics, NJ | B | 0.008 | |
| Aspartate | Sigma, St. Louis, MO | B | 0.0684 | |
| Putrescine | MP Biomedicals, Salon, | C | 0.9 | |
| | OH | | | |
| Cadaverine | MP Biomedicals, Salon, O | C | 0.6 | |
| Spermidine | MP Biomedicals, Salon, | C | 0.5 | |
| | OH | | | |
| Ornithine | Sigma, St. Louis, MO | C | 0.2 | |
| Citrulline | Sigma, St. Louis, MO | C | 0.2 | |
| Bicarbonate | Fisher Scientific, Fair | C | 1 | |
| | Lawn, NJ | | | |
| Glutamine | Sigma, St. Louis, MO | C | 0.09 | dissolve in 1 M HCl, |
| | | | | pH final to 7 |
| Lysine | Sigma, St. Louis, MO | D | 0.0732 | |
| Uracil | Sigma, St. Louis, MO | E | 0.224 | |
| Citrate | Fisher Scientific, Fair | F | 2 | |
| | Lawn, NJ | | | |
| Chorismate Group Mix | See above | A | See respective | |
| (includes all Group A | | | concentrations | |
| supplements listed | | | above | |
| above) | | | | |
| Homocysteine Group | See above | B | See respective | |
| Mix (includes all Group | | | concentrations | |
| B supplements listed | | | above | |
| above) | | | | |
| Polyamine Group Mix | See above | C | See respective | |
| (includes all Group C | | | concentrations | |
| supplements listed | | | above | |
| above) | | | | |

[0285] Further as to supplements, as to Group C regarding polyamine synthesis, the results of the examples demonstrate that 3-HP tolerance of E. coli was increased by adding the polyamines putrescine, spermidine and cadaverine to the media. Minimum inhibitory concentrations (MICs) for E. coli K12 in control and supplemented media were as follows: in M9 minimal media supplemented with putrescine 40 g/L, in M9 minimal media supplemented with spermidine 40 g/L, in M9 minimal media supplemented with cadaverine 30 g/L. Minimum inhibitory concentrations (MICs) for added sodium bicarbonate in M9 minimal media was 30 g/L. The Minimum inhibitory concentrations (MICs) for E. coli K12 in 100 g/L stock solution 3-HP was 20 g/L.

[0286] Further, in view of the increase over the control MIC with sodium bicarbonate supplementation, other alteration, such as regulation and/or genetic modification of carbonic anhydrase, such as providing a heterologous nucleic acid sequence to a cell of interest, where that nucleic acid sequence encodes a polypeptide possessing carbonic anhydrase activity are considered of value to increase tolerance to 3-HP (such as in combination with other alterations of the 3HPTGC). Similarly, and as supported by other data provided herein, alterations of the enzymatic activities, such as by genetic modification(s) of enzyme(s) along the 3HPTGC pathway portions that lead to arginine, putrescine, cadaverine and spermidine, are considered of value to increase tolerance to 3-HP (such as in combination with other alterations of the 3HPTGC).

[0287] It is appreciated that the results of supplementations evaluations provide evidence of the utility of direct supplementation into a culture media, and also of improving 3-HP tolerance by a genetic modification route, such as is provided in some examples herein. It is appreciated that increasing the concentration of a product of a 3HPTGC enzymatic conversion step, such as by a genetic modification, whether by supplementation and/or genetic modification(s), may be effective to increase the intracellular concentration of one or more 3HPTGC products in a microorganism and/or in the media in which such microorganism is cultured.

[0288] Taken together, the fitness data and subsequently obtained data from the examples related to genetic modifications and/or supplements pertaining to the 3HPTGC support a concept of a functional relationship between such alterations to increase enzymatic conversion along the pathways of the 3HPTGC and the resulting functional increase in 3-HP tolerance in a microorganism cell or culture system. This is observable for the 3HPTGC as a whole and also within and among its defined groups.

[0289] Further, tables 47, 48, 50, 52, 53, and 56, incorporated into this section, provide non-limiting examples supplements additions, genetic modifications, and combinations of supplements additions and genetic modifications. Additional supplementations, genetic modifications, and combinations thereof, may be made in view of these examples and the described methods of identifying genetic modifications toward achieving an elevated tolerance to 3-HP in a microorganism of interest. Particular combinations may involve only the 3HPTGC lower section, including combinations involving two or more, three or more, or four or more, of the five groups therein (each involving supplement additions and/or genetic modification), any of these in various embodiments also comprising one or more genetic modifications or supplement additions regarding the 3HPTGC upper section. Subject matter in the Examples is incorporated into this section to the extent not already present.

[0290] Based on these results, it is appreciated that in various embodiments of the invention, whether methods or compositions, as a result of genetic modification and/or supplementation of reactants of the 3HPTGC, the alteration(s) directed to the 3HPTGC are effective to increase 3-HP tolerance by at least 5 percent, at least 10 percent, at least 20 percent, at least 30 percent, or at least 50 percent above a 3-HP tolerance of a control microorganism, lacking said at least one 3HPTGC genetic modification.

[0291] As is appreciated by the examples, any of the genetically modified microorganisms of the invention may be provided in a culture system and utilized, such as for the production of 3-HP. In some embodiments, one or more supplements (that are products of the 3HPTGC enzymatic conversion steps) are provided to a culture system to further increase overall 3-HP tolerance in such culture system.

[0292] Increased tolerance to 3-HP, whether of a microorganism or a culture system, may be assessed by any method or approach known to those skilled in the art, including but not limited to those described herein.

[0293] The genetic modification of the 3HPTGC upper portion may involve any of the enzymatic conversion steps. One, non-limiting example regards the tricarboxylic acid cycle. It is known that the presence and activity of the enzyme citrate synthase (E.C. 2.3.3.1 (previously 4.1.3.7)), which catalyzes the first step in that cycle, controls the rate of the overall cycle (i.e., is a rate-limiter). Accordingly, genetic modification of a microorganism, such as to increase copy numbers and/or specific activity, and/or other related characteristics (such as lower effect of a feedback inhibitor or other control molecule), may include a modification of citrase synthase. Ways to effectuate such change for citrate synthase may utilize any number of laboratory techniques, such as are known in the art, including approaches described herein for other enzymatic conversion steps of the 3HPTGC. Further, several commonly known techniques are described in U.S. Pat. Nos. 6,110,714 and 7,247,459, both assigned to Ajinomoto Co., Inc., both of which are herewith incorporated by reference for their respective teachings about amplifying citrate synthase activity (specifically, cols. 3 and 4, and Examples 3 and 4, of U.S. Pat. No. 6,110,714, and cols. 11 and 12 (specifically Examples (1) and (2)) of U.S. Pat. No. 7,247,459).

[0294] In various embodiments E. coli strains are provided that comprise selected gene deletions directed to increase enzymatic conversion in the 3HPTGC and accordingly increase microorganism tolerance to 3-HP. For example, the following genes, which are associated with repression of pathways in the indicated 3HPTGC Groups, may be deleted: Group A—tyrR, trpR; Group B—metJ; Group C—purR; Group D—lysR; Group E—nrdR. There are for E. coli and it is known and determinable by one skilled in the art to identify and genetically modify equivalent repressor genes in this and other species.

[0295] A disruption of gene function may also be effectuated, in which the normal encoding of a functional enzyme by a nucleic acid sequence has been altered so that the production of the functional enzyme in a microorganism cell has been reduced or eliminated. A disruption may broadly include a gene deletion, and also includes, but is not limited to gene modification (e.g., introduction of stop codons, frame shift mutations, introduction or removal of portions of the gene, introduction of a degradation signal), affecting mRNA transcription levels and/or stability, and altering the promoter or repressor upstream of the gene encoding the polypeptide. In some embodiments, a gene disruption is taken to mean any genetic modification to the DNA, mRNA encoded from the DNA, and the amino acid sequence that results in at least a 50 percent reduction of enzyme function of the encoded gene in the microorganism cell.

[0296] Further, as to the full scope of the invention and for various embodiments, it is recognized that the above discussion and the examples are meant to be exemplary and not limiting. Genetic manipulations may be made to achieve a desired alteration in overall enzyme function, such as by reduction of feedback inhibition and other facets of control, including alterations in DNA transcriptional and RNA translational control mechanisms, improved mRNA stability, as well as use of plasmids having an effective copy number and promoters to achieve an effective level of improvement. Such genetic modifications may be chosen and/or selected for to achieve a higher flux rate through certain basic pathways within the 3HPTGC and so may affect general cellular metabolism in fundamental and/or major ways. Accordingly, in certain alternatives genetic modifications are made more selectively, to other parts of the 3HPTGC.

[0297] Further, based on analysis of location and properties of committed steps, feedback inhibition, and other factors and constraints, in various embodiments at least one genetic modification is made to increase overall enzymatic conversion for one of the following enzymes of the 3HPTGC: 2-dehydro-3-deoxyphosphoheptonate aldolase (e.g., aroF, aroG, aroH); cyanase (e.g., cynS); carbonic anhydrase (e.g., cynT); cysteine synthase B (e.g., cysM); threonine deaminase (e.g., ilvA); ornithine decarboxylase (e.g., speC, speF); adenosylmethionine decarboxylase (e.g., speD); and spermidine synthase (e.g., speE). Genetic modifications may include increasing copy numbers of the nucleic acid sequences encoding these enzymes, and providing modified nucleic acid sequences that have reduced or eliminated feedback inhibition, control by regulators, increased affinity for substrate, and other modifications. Thus, one aspect of the invention is to genetically modify one or more of these enzymes in a manner to increase enzymatic conversion at one or more 3HPTGC enzymatic conversion steps so as to increase flux and/or otherwise modify reaction flows through the 3HPTGC so that 3-HP tolerance is increased. In addition to the examples which pertain to genetic modifications regarding aroH and cyanase (with carbonic anhydrase), respectively, the following examples are provided. It is noted that in E. coli a second carbonic anhydrase enzyme is known. This is identified variously as Can and yadf.

[0298] Also, it is appreciated that various embodiments of the invention may comprise genetic modifications of the 3HPTGC (as may be provided in a microorganism, as described herein), and/or supplements thereof, excluding any one or more designated enzymatic conversion steps, product additions, and/or specific enzymes. For example, an embodiment of the invention may comprise genetic modifications of the 3HPTGC in a microorganism, however excluding those of Group A, or of Groups A and B, or of a defined one or more members of the 3HPTGC (which may be any subset of the 3HPTGC members).

[0299] For example, without being limiting, a modified 3HPTGC may comprise all members of the 3HPTGC as depicted herein except the degradative form of arginine decarboxylase (adiA, which is known to be induced in rich medium at low pH under anaerobic conditions in the presence of excess substrate), or other subsets excluding such degradative arginine decarboxylase and other selected enzyme steps. Other modified 3HPTGC complexes may also be practiced in various embodiments. Based on the noted induction of adiA, the use of the degradative form of arginine decarboxylase is not be considered within the scope of the 3HPTGC for 3-HP tolerance improvement as practiced under aerobic conditions.

[0300] Moreover, various non-limiting aspects of the invention may include, but are not limited to:

[0301] A genetically modified (recombinant) microorganism comprising a nucleic acid sequence that encodes a polypeptide with at least 85% amino acid sequence identity to any of the enzymes of any of 3-HP tolerance-related or biosynthetic pathways, wherein the polypeptide has enzymatic activity and specificity effective to perform the enzymatic reaction of the respective 3-HP tolerance-related or biosynthetic pathway enzyme, and the recombinant microorganism exhibits greater 3-HP tolerance and/or 3-HP bio-production than an appropriate control microorganism lacking such nucleic acid sequence.

[0302] A genetically modified (recombinant) microorganism comprising a nucleic acid sequence that encodes a polypeptide with at least 90% amino acid sequence identity to any of the enzymes of any of 3-HP tolerance-related or biosynthetic pathways, wherein the polypeptide has enzymatic activity and specificity effective to perform the enzymatic reaction of the respective 3-HP tolerance-related or biosynthetic pathway enzyme, and the recombinant microorganism exhibits greater 3-HP tolerance and/or 3-HP bio-production than an appropriate control microorganism lacking such nucleic acid sequence.

[0303] A genetically modified (recombinant) microorganism comprising a nucleic acid sequence that encodes a polypeptide with at least 95% amino acid sequence identity to any of the enzymes of any of 3-HP tolerance-related or biosynthetic pathways, wherein the polypeptide has enzymatic activity and specificity effective to perform the enzymatic reaction of the respective 3-HP tolerance-related or biosynthetic pathway enzyme, and the recombinant microorganism exhibits greater 3-HP tolerance and/or 3-HP bio-production than an appropriate control microorganism lacking such nucleic acid sequence. In some embodiments, the at least one polypeptide has at least 99% or 100% sequence identity to at least one of the enzymes of a 3-HPTGC pathway and/or a 3-HP biosynthetic pathway.

[0304] In one aspect of the invention the identity values in the preceding paragraphs are determined using the parameter set described above for the FASTDB software program, or BLASTP or BLASTN, such as version 2.2.2, using default parameters. Further, for all specifically recited sequences herein it is understood that conservatively modified variants thereof are intended to be included within the invention. In accordance with the present disclosure, in various embodiments the invention contemplates a genetically modified (e.g., recombinant) microorganism comprising a heterologous nucleic acid sequence that encodes a polypeptide that is an identified enzymatic functional variant of any of the enzymes of any of 3-HP tolerance-related pathways, or pathway portions (i.e., of the 3HPTGC), or other enzyme disclosed herein (e.g., of a 3-HP production pathway), wherein the polypeptide has enzymatic activity and specificity effective to perform the enzymatic reaction of the respective 3-HP tolerance-related or other enzyme, so that the recombinant microorganism exhibits greater 3-HP tolerance or other function than an appropriate control microorganism lacking such nucleic acid sequence. Relevant methods of the invention also are intended to be directed to identified enzymatic functional variants and the nucleic acid sequences that encode them. Embodiments may also comprise other functional variants.

[0305] In some embodiments, the invention contemplates a recombinant microorganism comprising at least one genetic modification effective to increase 3-hydroxypropionic acid (“3-HP”) production, wherein the increased level of 3-HP production is greater than the level of 3-HP production in the wild-type microorganism, and at least one genetic modification of the 3-HP Toleragenic Complex (“3HPTGC”). In some embodiments, the wild-type microorganism produces 3-HP. In some embodiments, the wild-type microorganism does not produce 3-HP. In some embodiments, the recombinant microorganism comprises at least one vector, such as at least one plasmid, wherein the at least one vector comprises at least one heterologous nucleic acid molecule.

[0306] In some embodiments of the invention, the at least one genetic modification of the 3HPTGC is effective to increase the 3-HP tolerance of the recombinant microorganism above the 3-HP tolerance of a control microorganism, wherein the control microorganism lacks the at least one 3HPTGC genetic modification. In some embodiments, the 3-HP tolerance of the recombinant microorganism is increased above the 3-HP tolerance of a control microorganism by about 5%, 10%, or 20%. In some embodiments, the 3-HP tolerance of the recombinant microorganism is increased above the 3-HP tolerance of a control microorganism by about 30%, 40%, 50%, 60%, 80%, or 100%.

[0307] Also, in various embodiments, the at least one genetic modification of the 3HPTGC encodes at least one polypeptide exhibiting at least one enzymatic conversion of at least one enzyme of the 3HPTGC, wherein the recombinant microorganism exhibits an increased 3-HP tolerance at least about 5, 10, 20, 30, 40, 50, 60, or 100 percent greater, or more, than the 3-HP tolerance of a control microorganism lacking the at least one genetic modification of the 3HPTGC, Any evaluations for such tolerance improvements may be based on a Minimum Inhibitory Concentration evaluation in a minimal media.

[0308] In some embodiments, the microorganism further comprises at least one additional genetic modification encoding at least one polypeptide exhibiting at least one enzymatic conversion of at least one enzyme of a second Group different from the genetic modification of a first Group of the 3HPTGC, wherein the recombinant microorganism exhibits an increased 3-HP tolerance at least about 5, 10, 20, 30, 40, 50, 60, or 100 percent greater, or more, than the 3-HP tolerance of a control microorganism lacking all said genetic modifications of the 3HPTGC. In the various embodiments, the at least one additional genetic modification further comprises a genetic modification from each of two or more, or three or more, of the Groups A-F.

[0309] For example, the genetic modifications may comprise at least one genetic modification of Group A and at least one genetic modification of Group B, at least one genetic modification of Group A and at least one genetic modification of Group C, at least one genetic modification of Group A and at least one genetic modification of Group D, at least one genetic modification of Group A and at least one genetic modification of Group E, at least one genetic modification of Group B and at least one genetic modification of Group C, at least one genetic modification of Group B and at least one genetic modification of Group D, at least one genetic modification of Group B and at least one genetic modification of Group E, at least one genetic modification of Group C and at least one genetic modification of Group D, at least one genetic modification of Group C and at least one genetic modification of Group E, or at least one genetic modification of Group D and at least one genetic modification of Group E. Any such combinations may be further practiced with Group F genetic modifications.

[0310] In some embodiments, the recombinant microorganism comprises one or more gene disruptions of 3HPTGC repressor genes selected from tyrR, trpR, metJ, argR, purR, lysR and nrdR.

[0311] In some embodiments, the at least one genetic modification of the 3HPTGC comprises means to increase expression of SEQ ID NO: 129 (Irok peptide). In some embodiments, the recombinant microorganism is an E. coli strain. In some embodiments, the recombinant microorganism is a Cupriavidus necator strain.

[0312] In some embodiments, the at least one genetic modification encodes at least one polypeptide with at least 85% amino acid sequence identity to at least one of the enzymes of a 3-HPTGC pathway, a 3-HP biosynthetic pathway, and/or SEQ ID NO: 129 (Irok).

[0313] Some embodiments of the invention contemplate a culture system. In some embodiments, the culture system comprises a genetically modified microorganism as described herein and a culture media. Such genetically modified microorganism may comprise a single genetic modification of the 3HPTGC, or any of the combinations described herein, and may additionally comprise one or more genetic modifications of a 3-HP production pathway. In some embodiments, the culture media comprises at least about 1 g/L, at least about 5 g/L, at least about 10 g/L, at least about 15 g/L, or at least about 20 g/L of 3-HP. In some embodiments, the culture system comprises a 3HPTGC supplement at a respective concentration such as that shown herein.

[0314] In some embodiments the invention contemplates a method of making a genetically modified microorganism comprising providing at least one genetic modification to increase the enzymatic conversion of the genetically modified microorganism over the enzymatic conversion of a control microorganism, wherein the control microorganism lacks the at least one genetic modification, at an enzymatic conversion step of the 3-hydroxypropionic acid Toleragenic Complex (“3HPTGC”), wherein the genetically modified microorganism synthesizes 3-HP. In some embodiments, the control microorganism synthesizes 3-HP. In some embodiments, the at least one genetic modification increases the 3-HP tolerance of the genetically modified microorganism above the 3-HP tolerance of the control microorganism.

[0315] In some embodiments, the 3-HP tolerance of the genetically modified microorganism is at least about 5 percent, at least about 10 percent, at least about 20 percent, at least about 30 percent, at least about 40 percent, at least about 50 percent, or at least about 100 percent above the 3-HP tolerance of the control microorganism. In some embodiments, the 3-HP tolerance of the genetically modified microorganism is from about 50 to about 300 percent above the 3-HP tolerance of the control microorganism, based on a Minimum Inhibitory Concentration evaluation in a minimal media. In some embodiments, the genetically modified microorganism further comprises one or more gene disruptions of 3HPTGC repressor genes selected from tyrR, trpR, metJ, argR, purR, lysR and nrdR. In some embodiments, the control microorganism does not synthesize 3-HP. In some embodiments, providing at least one genetic modification comprises providing at least one vector. In some embodiments, the at least one vector comprises at least one plasmid. In some embodiments, providing at least one genetic modification comprises providing at least one nucleic acid molecule. In some embodiments, the at least one nucleic acid molecule is heterologous. In some embodiments, the at least one nucleic acid molecule encodes SEQ ID NO: 129 (Irok).

[0316] In some embodiments, genetic modifications are made to increase enzymatic conversion at an enzymatic conversion step identified to have an elevated fitness score in Table 3 and/or evaluated in the Examples. Enzymes that catalyze such reactions are numerous and include cyanase and carbonic anhydrase.

[0317] Also, it is appreciated that various embodiments of the invention may be directed to amino acid sequences of enzymes that catalyze the enzymatic conversion steps of the 3HPTGC for any species. More particularly, the amino acid sequences of the 3HPTGC for FIGS. 9A-D are readily obtainable from one or more of commonly used bioinformatics databases (e.g., <<www.ncbi.gov>>; <<www.metacyc.org>>) by entering a respective gene for an enzymatic conversion step therein.

[0318] IX. Combinations of Genetic Modifications

[0319] Various embodiments of the present invention comprise a genetically modified microorganism comprising at least one genetic modification to introduce or increase malonyl-CoA-reductase enzymatic activity, including by introducing a polynucleotide that expresses a functional equivalent of the malonyl-CoA-reductase provided herein. A functional equivalent of malonyl-CoA-reductase enzymatic activity is capable of increasing enzymatic activity for conversion of malonyl-CoA to malonate semialdehyde, malonate semialdehyde to 3-HP, or both.

[0320] In some embodiments, the amino acid sequence of the malonyl-CoA-reductase comprises SEQ ID NO:783. In other embodiments, the malonyl-CoA-reductase comprises a variant of any of SEQ ID NOs:783 to 791 exhibiting malonyl-CoA-reductase enzymatic activity.

[0321] The amino acid sequence of the malonyl-CoA-reductase can comprise an amino acid sequence having at least 50%, 60%, 70%, 80%, 85%, 90%, 92%, 95%, 96%, 97%, 98% or 99% sequence identity to any one of SEQ ID NOs: 783 to 791.

[0322] In some embodiments, at least one genetic modification comprises providing a polynucleotide that encodes an amino acid sequence comprising one of, or a functional portion of, any of SEQ ID NOs: 783 to 791. In various embodiments, at least one genetic modification comprises providing a polynucleotide that encodes an amino acid sequence having at least 50%, 60%, 70%, 80%, 85%, 90%, 92%, 95%, 96%, 97%, 98% or 99% sequence identity to any of SEQ ID NOs: 783 to 791.

[0323] In exemplary embodiments, the polynucleotide is codon-optimized for a selected microorganism species to encode any one of SEQ ID NOs: 783 to 791. In various embodiments, the polynucleotide is codon-optimized to encode an amino acid sequence having at least 50%, 60%, 70%, 80%, 85%, 90%, 92%, 95%, 96%, 97%, 98% or 99% sequence identity to any one of SEQ ID NOs: 783 to 791. The polynucleotide can be codon-optimized for E. coli, for example.

[0324] In some embodiments, the genetically modified microorganism that so possesses malonyl-CoA-reductase genetic modification(s) additionally comprises at least one genetic modification to increase, in the genetically modified microorganism, a protein function selected from the protein functions of Table 6A (Glucose transporter function (such as by galP), pyruvate dehydrogenase E1p, dihydrolipoamide acetyltransferase, and pyruvate dehydrogenase E3). In certain embodiments, the genetically modified microorganism comprises at least one genetic modification to increase two, three, or four protein functions selected from the protein functions of Table 6A.

[0325] In some embodiments, such genetically modified microorganism additionally comprises at least one genetic modification to decrease protein functions selected from the protein functions of Table 6B, lactate dehydrogenase, pyruvate formate lyase, pyruvate oxidase, phosphate acetyltransferase, histidyl phosphorylatable protein (of PTS), phosphoryl transfer protein (of PTS), and the polypeptide chain (of PTS).

[0326] In various embodiments, such genetically modified microorganism comprises at least one genetic modification to decrease enzymatic activity of two, three, four, five, six, or seven protein functions selected from the protein functions of Table 6B. Also, in various embodiments at least one, or more than one, genetic modification is made to modify the protein functions of Table 7 in accordance with the Comments therein.

[0327] It will be appreciated that, in various embodiments, there can be many possible combinations of increases in one or more protein functions of Table 6A, with reductions in one or more protein functions of Table 6A in the genetically modified microorganism comprising at least one genetic modification to provide or increase malonyl-CoA-reductase protein function (i.e, enzymatic activity). Protein functions can be independently varied, and any combination (i.e., a full factorial) of genetic modifications of protein functions in Tables 6A, 6B, and 7 herein can be adjusted by the methods taught and provided into said genetically modified microorganism.

[0328] In some embodiments, at least one genetic modification to decrease enzymatic activity is a gene disruption. In some embodiments, at least one genetic modification to decrease enzymatic activity is a gene deletion.

[0329] In various embodiments, to obtain 3-hydroxypropionic acid (3-HP) as a desired product, the genetically modified microorganism comprises a protein function effective for converting malonate semialdehyde to 3-HP. The protein function effective for converting malonate semialdehyde to 3-HP can be native to the microorganism, but that is by no means necessary.

[0330] In some embodiments, the protein function effective for converting malonate semialdehyde to 3-HP is a native or mutated form of mmsB from Pseudomonas aeruginosa s, or a functional equivalent thereof. Alternatively, or additionally, this protein function can be a native or mutated form of ydfG, or a functional equivalent thereof.

[0331] Certain embodiments of the invention additionally comprise a genetic modification to increase the availability of the cofactor NADPH, which can increase the NADPH/NADP+ ratio as may be desired. Non-limiting examples for such genetic modification are pgi (E.C. 5.3.1.9, in a mutated form), pntAB (E.C. 1.6.1.2), overexpressed, gapA (E.C. 1.2.1.12):gapN (E.C. 1.2.1.9, from Streptococcus mutans) substitution/replacement, and disrupting or modifying a soluble transhydrogenase such as sthA (E.C. 1.6.1.2), and/or genetic modifications of one or more of zwf (E.C. 1.1.1.49), gnd (E.C. 1.1.1.44), and edd (E.C. 4.2.1.12). Sequences of these genes are available at www.metacyc.org. Also, the sequences for the genes and encoded proteins for the E. coli gene names shown in Tables 6A, 6B, and 7 are provided in U.S. Provisional Patent Application No. 61/246,141, incorporated herein in its entirety and for such sequences, and also are available at www.ncbi.gov as well as www.metacyc.org or www.ecocyc.org.

[0332] In some embodiments, the genetic modification increases microbial synthesis of 3-HP above a rate or titer of a control microorganism lacking said at least one genetic modification to produce 3-HP. In some embodiments, the genetic modification is effective to increase enzymatic conversions to 3-HP by at least about 5 percent, at least about 10 percent, at least about 20 percent, at least about 30 percent, or at least about 50 percent above the enzymatic conversion of a control microorganism lacking the genetic modification.

TABLE 6A

| | E.C. | Gene Name |
|---|---|---|
| Enzyme Function | Classification | in E. coli |
| Glucose transporter | N/A | galP |
| Pyruvate dehydrogenase E1p | 1.2.4.1 | aceE |
| lipoate acetyltransferase/dihydrolipoamide | 2.3.1.12 | aceF |
| acetyltransferase | | |
| Pyruvate dehydrogenase E3 (lipoamide | 1.8.1.4 | lpd |
| dehydrogenase) | | |

TABLE 6B

| | E.C. | Gene Name |
|---|---|---|
| Enzyme Function | Classification | in E. coli |
| Lactate dehydrogenase | 1.1.1.28 | ldhA |
| Pyruvate formate lyase (B “inactive”) | 2.3.1.— | pflB |
| Pyruvate oxidase | 1.2.2.2 | poxB |
| Phosphate acetyltransferase | 2.3.1.8 | Pta |
| Heat stable, histidyl phosphorylatable | N/A | ptsH (HPr) |
| protein (of PTS) | | |
| Phosphoryl transfer protein (of PTS) | N/A | ptsI |
| Polypeptide chain (of PTS) | N/A | Crr |

TABLE 7

| | E.C. | Gene Name | |
|---|---|---|---|
| Enzyme Function | Classification | in E. coli | Comments |
| β ketoacyl-acyl carrier | 2.3.1.179 | fabF | Decrease |
| protein synthase I | 2.3.1.41 | | function, |
| 3-OXOACYL-ACP- | | | including by |
| SYNTHASE | | | mutation |
| II-MONOMER | | | |
| β-ketoacyl-ACP | 2.3.1.41 | fabB | Decrease |
| synthase I, 3-oxoacyl- | 2.3.1.— | | function, |
| ACP-synthase I | | | including by |
| | | | mutation |
| Malonyl-CoA- | 2.3.1.39 | fabD | Decrease |
| ACP transacylase | | | function, |
| | | | including by |
| | | | mutation |
| enoyl acyl carrier | 1.3.1.9, | fabI | Decrease |
| protein reductase | 1.3.1.10 | | function, |
| | | | including by |
| | | | mutation |
| β-ketoacyl-acyl carrier | 2.3.1.180 | fabH | Decrease |
| protein synthase III | | | function, |
| | | | including by |
| | | | mutation |
| Carboxyl transferase | 6.4.1.2 | accA | Increase |
| subunit α subunit | | | function |
| Biotin carboxyl | 6.4.1.2 | accB | Increase |
| carrier protein | | | function |
| Biotin carboxylase | 6.3.4.14 | accC | Increase |
| subunit | | | function |
| Carboxyl transferase | 6.4.1.2 | accD | Increase |
| subunit β subunit | | | function |
| long chain fatty acyl | 3.1.2.2, | tesA | Increase |
| thioesterase I | 3.1.1.5 | | function |
| GDP | 2.7.6.5 | relA | Decrease |
| pyrophosphokinase/ | | | function, |
| GTP | | | including by |
| pyrophosphokinase | | | mutation |
| GDP | 2.7.6.5, | Spot | Decrease |
| diphosphokinase/ | 3.1.7.2 | | function, |
| guanosine-3′,5′- | | | including by |
| bis(diphosphate) 3′- | | | mutation |
| diphosphatase | | | |

[0333] Further with regard to descrasing enzyme function based on Table 7's teachings, any one or a combination of enzyme functions of the following may be decreased in a particular embodiment combined with other genetic modifications described herein: β-ketoacyl-ACP synthase I, 3-oxoacyl-ACP-synthase I; Malonyl-CoA-ACP transacylase; enoyl acyl carrier protein reductase; and β-ketoacyl-acyl carrier protein synthase III.

[0334] Accordingly, as described in various sections above, some compositions, methods and systems of the present invention comprise providing a genetically modified microorganism that comprises both a production pathway to a selected chemical product, such as 3-HP, and a modified polynucleotide that encodes an enzyme of the fatty acid synthase system that exhibits reduced activity, so that utilization of malonyl-CoA shifts toward the production pathway compared with a comparable (control) microorganism lacking such modifications. The methods involve producing the chemical product using a population of such genetically modified microorganism in a vessel, provided with a nutrient media. Other genetic modifications described herein, to other enzymes, such as acetyl-CoA carboxylase and/or NADPH-dependent transhydrogenase, may be present in some such embodiments. Providing additional copies of polynucleotides that encode polypeptides exhibiting these enzymatic activities is shown to increase 3-HP production. Other ways to increase these respective enzymatic activities is known in the art and may be applied to various embodiments of the present invention. SEQ ID NOs for these polynucleotides and polypeptides of E. coli are: acetyl-CoA carboxylase (accABCD, SEQ ID NOs:771-778); and NADPH-dependent transhydrogenase (SEQ ID NOs:779-782), also referred to as pyridine nucleotide transhydrogenase, pntAB in E. coli).

[0335] Also, without being limiting, a first step in some multi-phase method embodiments of making a chemical product may be exemplified by providing into a vessel, such as a culture or bioreactor vessel, a nutrient media, such as a minimal media as known to those skilled in the art, and an inoculum of a genetically modified microorganism so as to provide a population of such microorganism, such as a bacterium, and more particularly a member of the family Enterobacteriaceae, such as E. coli, where the genetically modified microorganism comprises a metabolic pathway that converts malonyl-CoA to 3-HP molecules. For example, genetic modifications may include the provision of at least one nucleic acid sequence that encodes a gene encoding the enzyme malonyl-CoA reductase in one of its bi-functional forms, or that encodes genes encoding a mono-functional malonyl-CoA reductase and an NADH- or NADPH-dependent 3-hydroxypropionate dehydrogenase (e.g., ydfG or mmsB from E. coli, or mmsB from Pseudomonas aeruginosa). In either case, when provided into an E. coli host cell, these genetic modifications complete a metabolic pathway that converts malonyl-CoA to 3-HP. This inoculum is cultured in the vessel so that the cell density increases to a cell density suitable for reaching a production level of 3-HP that meets overall productivity metrics taking into consideration the next step of the method. In various alternative embodiments, a population of these genetically modified microorganisms may be cultured to a first cell density in a first, preparatory vessel, and then transferred to the noted vessel so as to provide the selected cell density. Numerous multi-vessel culturing strategies are known to those skilled in the art. Any such embodiments provide the selected cell density according to the first noted step of the method.

[0336] Also without being limiting, a subsequent step may be exemplified by two approaches, which also may be practiced in combination in various embodiments. A first approach provides a genetic modification to the genetically modified microorganism such that its enoyl-ACP reductase enzymatic activity may be controlled. As one example, a genetic modification may be made to substitute for the native enoyl-ACP reductase a temperature-sensitive mutant enoyl-ACP reductase (e.g., fabI^{TS} in E. coli). The latter may exhibit reduced enzymatic activity at temperatures above 30 C but normal enzymatic activity at 30 C, so that elevating the culture temperature to, for example to 34 C, 35 C, 36 C, 37 C or even 42 C, reduces enzymatic activity of enoyl-ACP reductase. In such case, more malonyl-CoA is converted to 3-HP or another chemical product than at 30 C, where conversion of malonyl-CoA to fatty acids is not impeded by a less effective enoyl-ACP reductase.

[0337] For the second approach, an inhibitor of enoyl-ACP reductase, or another of the fatty acid synthase enzyme, is added to reduce conversion of malonyl-CoA to fatty acids. For example, the inhibitor cerulenin is added at a concentration that inhibits one or more enzymes of the fatty acid synthase system. FIG. 2A depicts relevant pathways and shows three inhibitors—thiolactomycin, triclosan, and cerulenin, next to the enzymes that they inhibit. Encircled E. coli gene names indicate a temperature-sensitive mutant is available for the polypeptide encoded by the gene. FIG. 2B provides a more detailed depiction of representative enzymatic conversions and exemplary E. coli genes of the fatty acid synthetase system that was more generally depicted in FIG. 2A. This listing of inhibitors of microorganism fatty acid synthetase enzymes is not meant to be limiting. Other inhibitors, some of which are used as antibiotics, are known in the art and include, but are not limited to, diazaborines such as thienodiazaborine, and, isoniazid.

[0338] In some embodiments, the genetic modification increases microbial synthesis of 3-HP above a rate or titer of a control microorganism lacking said at least one genetic modification to produce 3-HP. In some embodiments, the genetic modification is effective to increase enzymatic conversions to 3-HP by at least about 5 percent, at least about 10 percent, at least about 20 percent, at least about 30 percent, or at least about 50 percent above the enzymatic conversion of a control microorganism lacking the genetic modification.

[0339] Genetic modifications as described herein may include modifications to reduce enzymatic activity of any one or more of: β-ketoacyl-ACP synthase I, 3-oxoacyl-ACP-synthase I; Malonyl-CoA-ACP transacylase; enoyl acyl carrier protein reductase; and β-ketoacyl-acyl carrier protein synthase III.

[0340] Accordingly, as described in various sections above, some compositions, methods and systems of the present invention comprise providing a genetically modified microorganism that comprises both a production pathway to a selected chemical product, such as 3-HP, and a modified polynucleotide that encodes an enzyme of the fatty acid synthase system that exhibits reduced activity, so that utilization of malonyl-CoA shifts toward the production pathway compared with a comparable (control) microorganism lacking such modifications. The methods involve producing the chemical product using a population of such genetically modified microorganism in a vessel, provided with a nutrient media. Other genetic modifications described herein, to other enzymes, such as acetyl-CoA carboxylase and/or NADPH-dependent transhydrogenase, may be present in some such embodiments. Providing additional copies of polynucleotides that encode polypeptides exhibiting these enzymatic activities is shown to increase 3-HP production. Other ways to increase these respective enzymatic activities is known in the art and may be applied to various embodiments of the present invention. SEQ ID NOs for these polynucleotides and polypeptides of E. coli are: acetyl-CoA carboxylase (accABCD, SEQ ID NOs:771-778); and NADPH-dependent transhydrogenase (SEQ ID NOs:779-782), also referred to as pyridine nucleotide transhydrogenase, pntAB in E. coli).

[0341] Also, without being limiting, a first step in some multi-phase method embodiments of making a chemical product may be exemplified by providing into a vessel, such as a culture or bioreactor vessel, a nutrient media, such as a minimal media as known to those skilled in the art, and an inoculum of a genetically modified microorganism so as to provide a population of such microorganism, such as a bacterium, and more particularly a member of the family Enterobacteriaceae, such as E. coli, where the genetically modified microorganism comprises a metabolic pathway that converts malonyl-CoA to 3-HP molecules. For example, genetic modifications may include the provision of at least one nucleic acid sequence that encodes a gene encoding the enzyme malonyl-CoA reductase in one of its bi-functional forms, or that encodes genes encoding a mono-functional malonyl-CoA reductase and an NADH- or NADPH-dependent 3-hydroxypropionate dehydrogenase (e.g., ydfG or mmsB from E. coli, or mmsB from Pseudomonas aeruginosa). In either case, when provided into an E. coli host cell, these genetic modifications complete a metabolic pathway that converts malonyl-CoA to 3-HP. This inoculum is cultured in the vessel so that the cell density increases to a cell density suitable for reaching a production level of 3-HP that meets overall productivity metrics taking into consideration the next step of the method. In various alternative embodiments, a population of these genetically modified microorganisms may be cultured to a first cell density in a first, preparatory vessel, and then transferred to the noted vessel so as to provide the selected cell density. Numerous multi-vessel culturing strategies are known to those skilled in the art. Any such embodiments provide the selected cell density according to the first noted step of the method.

[0342] Also without being limiting, a subsequent step may be exemplified by two approaches, which also may be practiced in combination in various embodiments. A first approach provides a genetic modification to the genetically modified microorganism such that its enoyl-ACP reductase enzymatic activity may be controlled. As one example, a genetic modification may be made to substitute for the native enoyl-ACP reductase a temperature-sensitive mutant enoyl-ACP reductase (e.g., fabI^{TS} in E. coli). The latter may exhibit reduced enzymatic activity at temperatures above 30 C but normal enzymatic activity at 30 C, so that elevating the culture temperature to, for example to 34 C, 35 C, 36 C, 37 C or even 42 C, reduces enzymatic activity of enoyl-ACP reductase. In such case, more malonyl-CoA is converted to 3-HP or another chemical product than at 30 C, where conversion of malonyl-CoA to fatty acids is not impeded by a less effective enoyl-ACP reductase.

[0343] For the second approach, an inhibitor of enoyl-ACP reductase, or another of the fatty acid synthase enzyme, is added to reduce conversion of malonyl-CoA to fatty acids. For example, the inhibitor cerulenin is added at a concentration that inhibits one or more enzymes of the fatty acid synthase system. FIG. 2A depicts relevant pathways and shows three inhibitors—thiolactomycin, triclosan, and cerulenin, next to the enzymes that they inhibit. Encircled E. coli gene names indicate a temperature-sensitive mutant is available for the polypeptide encoded by the gene. FIG. 2B provides a more detailed depiction of representative enzymatic conversions and exemplary E. coli genes of the fatty acid synthetase system that was more generally depicted in FIG. 2A. This listing of inhibitors of microorganism fatty acid synthetase enzymes is not meant to be limiting. Other inhibitors, some of which are used as antibiotics, are known in the art and include, but are not limited to, diazaborines such as thienodiazaborine, and, isoniazid.

[0344] The 3-HP tolerance aspects of the present invention can be used with any microorganism that makes 3-HP, whether that organism makes 3-HP naturally or has been genetically modified by any method to produce 3-HP.

[0345] As to the 3-HP production increase aspects of the invention, which may result in elevated titer of 3-HP in industrial bio-production, the genetic modifications comprise introduction of one or more nucleic acid sequences into a microorganism, wherein the one or more nucleic acid sequences encode for and express one or more production pathway enzymes (or enzymatic activities of enzymes of a production pathway). In various embodiments these improvements thereby combine to increase the efficiency and efficacy of, and consequently to lower the costs for, the industrial bio-production production of 3-HP.

[0346] Any one or more of a number of 3-HP production pathways may be used in a microorganism such as in combination with genetic modifications directed to improve 3-HP tolerance. In various embodiments genetic modifications are made to provide enzymatic activity for implementation of one or more of such 3-HP production pathways. Several 3-HP production pathways are known in the art. For example, U.S. Pat. No. 6,852,517 teaches a 3-HP production pathway from glycerol as carbon source, and is incorporated by reference for its teachings of that pathway. This reference teaches providing a genetic construct which expresses the dhaB gene from Klebsiella pneumoniae and a gene for an aldehyde dehydrogenase. These are stated to be capable of catalyzing the production of 3-HP from glycerol. However, it is recognized that in some embodiments the carbon source for a bio-production of 3-HP excludes glycerol as a major portion of the carbon source.

[0347] WO 2002/042418 teaches several 3-HP production pathways. This PCT publication is incorporated by reference for its teachings of such pathways. Also, FIG. 44 of that publication, which summarizes a 3-HP production pathway from glucose to pyruvate to acetyl-CoA to malonyl-CoA to 3-HP, is provided herein. FIG. 55 of that publication, which summarizes a 3-HP production pathway from glucose to phosphoenolpyruvate (PEP) to oxaloacetate (directly or via pyruvate) to aspartate to β-alanine to malonate semialdehyde to 3-HP, is provided herein. Representative enzymes for various conversions are also shown in these figures.

[0348] FIG. 13, from U.S. Patent Publication No. US2008/0199926, published Aug. 21, 2008 and incorporated by reference herein, summarizes the herein-described 3-HP production pathways and other known natural pathways. More generally as to developing specific metabolic pathways, of which many may be not found in nature, Hatzimanikatis et al. discuss this in “Exploring the diversity of complex metabolic networks,” Bioinformatics 21(8):1603-1609 (2005). This article is incorporated by reference for its teachings of the complexity of metabolic networks.

[0349] Further to the 3-HP production pathway summarized in the figures, Strauss and Fuchs (“Enzymes of a novel autotrophic CO₂ fixation pathway in the phototrophic bacterium Chloroflexus aurantiacus, the 3-hydroxyproprionate cycle,” Eur. J. Bichem. 215, 633-643 (1993)) identified a natural bacterial pathway that produced 3-HP. At that time the authors stated the conversion of malonyl-CoA to malonate semialdehyde was by an NADP-dependant acylating malonate semialdehyde dehydrogenase and conversion of malonate semialdehyde to 3-HP was catalyzed by a 3-hydroxyproprionate dehydrogenase. However, since that time it has become appreciated that, at least for Chloroflexus aurantiacus, a single enzyme may catalyze both steps (M. Hugler et al., “Malonyl-Coenzyme A Reductase from Chloroflexus aurantiacus, a Key Enzyme of the 3-Hydroxypropionate Cycle for Autotrophic CO₂ Fixation,” J. Bacter, 184(9):2404-2410 (2002)).

[0350] Accordingly, one production pathway of various embodiments of the present invention comprises malonyl-Co-A reductase enzymatic activity that achieves conversions of malonyl-CoA to malonate semialdehyde to 3-HP. As provided in an example herein, introduction into a microorganism of a nucleic acid sequence encoding a polypeptide providing this enzyme (or enzymatic activity) is effective to provide increased 3-HP biosynthesis.

[0351] Another 3-HP production pathway is provided in FIG. 14B (FIG. 14A showing the natural mixed fermentation pathways) and explained in this and following paragraphs. This is a 3-HP production pathway that may be used with or independently of other 3-HP production pathways. One possible way to establish this biosynthetic pathway in a recombinant microorganism, one or more nucleic acid sequences encoding an oxaloacetate alpha-decarboxylase (oad-2) enzyme (or respective or related enzyme having such activity) is introduced into a microorganism and expressed. As exemplified in the Examples, which are not meant to be limiting, enzyme evolution techniques are applied to enzymes having a desired catalytic role for a structurally similar substrate, so as to obtain an evolved (e.g., mutated) enzyme (and corresponding nucleic acid sequence(s) encoding it), that exhibits the desired catalytic reaction at a desired rate and specificity in a microorganism.

[0352] Thus, for various embodiments of the invention the genetic manipulations to any pathways of the 3HPTCG and any of the 3-HP bio-production pathways may be described to include various genetic manipulations, including those directed to change regulation of, and therefore ultimate activity of, an enzyme or enzymatic activity of an enzyme identified in any of the respective pathways. Such genetic modifications may be directed to transcriptional, translational, and post-translational modifications that result in a change of enzyme activity and/or selectivity under selected and/or identified culture conditions. Thus, in various embodiments, to function more efficiently, a microorganism may comprise one or more gene deletions. For example, as summarized in FIG. 14B for a particular embodiment in E. coli, the genes encoding lactate dehydrogenase (ldhA), phosphate acetyltransferase (pta), pyruvate oxidase (poxB) and pyruvate-formate lyase (pflB) may be deleted. Such gene deletions are summarized at the bottom of FIG. 14B for a particular embodiment, which is not meant to be limiting. Additionally, a further deletion or other modification to reduce enzymatic activity, of multifunctional 2-keto-3-deoxygluconate 6-phosphate aldolase and 2-keto-4-hydroxyglutarate aldolase and oxaloacetate decarboxylase (eda in E. coli), may be provided to various strains. Further to the latter, in various embodiments combined with such reduction of enzymatic activity of multifunctional 2-keto-3-deoxygluconate 6-phosphate aldolase and 2-keto-4-hydroxyglutarate aldolase and oxaloacetate decarboxylase (eda in E. coli), further genetic modifications may be made to increase a glucose transporter (e.g. galP in E. coli) and/or to decrease activity of one or more of heat stable, histidyl phosphorylatable protein (of PTS) (ptsH (HPr) in E. coli), phosphoryl transfer protein (of PTS) (ptsI in E. coli), and the polypeptide chain of PTS (Crr in E. coli).

[0353] Gene deletions may be accomplished by mutational gene deletion approaches, and/or starting with a mutant strain having reduced or no expression of one or more of these enzymes, and/or other methods known to those skilled in the art.

[0354] Aspects of the invention also regard provision of multiple genetic modifications to improve microorganism overall effectiveness in converting a selected carbon source into a chemical product such as 3-HP. Particular combinations are shown, such as in the Examples, to increase specific productivity, volumetric productivity, titer and yield substantially over more basic combinations of genetic modifications.

[0355] Further to FIG. 9 genetic modifications, appropriate additional genetic modifications can provide further improved production metrics. For example, a genetically modified strain is depicted in FIG. 8. This strain comprises genetic modifications for 3-HP production (such as described above in Section VII above), 3-HP tolerance (such as described below), and additional genetic modifications as disclosed herein (including a particular genetic modification regarding the fatty acid synthase system, not to be limiting, such modifications more generally disclosed elsewhere herein including in Section VI). In this figure enzyme functions are indicated by indicated enzymatic conversions and/or representative E. coli gene identifiers that encode proteins having such enzyme functions (except that mcr indicates non-E. coli malonyl-CoA reductase), deletions are shown by the standard “Δ” before the respective gene identifier, and increased enzymatic activities are shown by underlining (noting that additional targets for modifications are as indicated in the embedded table of the figure). Genes in parentheses are possible substitutes for or supplements of an enzyme encoded by another gene also shown along the respective pathway step. Also, the use of fabI^{TS} represents a substitution for the native non-temperature-sensitive gene. This is not meant to be limiting; as described elsewhere there are a number of approaches to control and limit flux to fatty acyl-ACP.

[0356] The embodiment of FIG. 8 depicts a number of genetic modifications in combination, however in various embodiments of the present invention other combinations of the genetic modifications of these enzymatic functions may be provided to achieve a desired level of increased rate, titer and yield as to bio-production of a chemical product.

[0357] Additional genetic modifications may be provided in a microorganism strain of the present invention. Many such modifications may be provided to impart a particular phenotype.

[0358] As one example, a deletion, of multifunctional 2-keto-3-deoxygluconate 6-phosphate aldolase and 2-keto-4-hydroxyglutarate aldolase and oxaloacetate decarboxylase (eda in E. coli), may be provided to various strains.

[0359] For example, the ability to utilize sucrose may be provided, and this would expand the range of feed stocks that can be utilized to produce 3-HP or other chemical products. Common laboratory and industrial strains of E. coli, such as the strains described herein, are not capable of utilizing sucrose as the sole carbon source. Since sucrose, and sucrose-containing feed stocks such as molasses, are abundant and often used as feed stocks for the production by microbial fermentation, adding appropriate genetic modifications to permit uptake and use of sucrose may be practiced in strains having other features as provided herein. Various sucrose uptake and metabolism systems are known in the art (for example, U.S. Pat. No. 6,960,455), incorporated by reference for such teachings. These and other approaches may be provided in strains of the present invention. The examples provide at least two approaches.

[0360] Also, genetic modifications may be provided to add functionality for breakdown of more complex carbon sources, such as cellulosic biomass or products thereof, for uptake, and/or for utilization of such carbon sources. For example, numerous cellulases and cellulase-based cellulose degradation systems have been studied and characterized (see, for example, and incorporated by reference herein for such teachings, Beguin, P and Aubert, J-P (1994) FEMS Microbial. Rev. 13: 25-58; Ohima, K. et al. (1997) Biotechnol. Genet. Eng. Rev. 14: 365414).

[0361] In addition to the above-described genetic modifications, in various embodiments genetic modifications also are provided to increase the pool and availability of the cofactor NADPH, and/or, consequently, the NADPH/NADP⁺ ratio. For example, in various embodiments for E. coli, this may be done by increasing activity, such as by genetic modification, of one or more of the following genes-pgi (in a mutated form), pntAB, overexpressed, gapA:gapN substitution/replacement, and disrupting or modifying a soluble transhydrogenase such as sthA, and/or genetic modifications of one or more of zwf, gnd, and edd.

[0362] Any such genetic modifications may be provided to species not having such functionality, or having a less than desired level of such functionality.

[0363] More generally, and depending on the particular metabolic pathways of a microorganism selected for genetic modification, any subgroup of genetic modifications may be made to decrease cellular production of fermentation product(s) selected from the group consisting of acetate, acetoin, acetone, acrylic, malate, fatty acid ethyl esters, isoprenoids, glycerol, ethylene glycol, ethylene, propylene, butylene, isobutylene, ethyl acetate, vinyl acetate, other acetates, 1,4-butanediol, 2,3-butanediol, butanol, isobutanol, sec-butanol, butyrate, isobutyrate, 2-OH-isobutryate, 3-OH-butyrate, ethanol, isopropanol, D-lactate, L-lactate, pyruvate, itaconate, levulinate, glucarate, glutarate, caprolactam, adipic acid, propanol, isopropanol, fusel alcohols, and 1,2-propanediol, 1,3-propanediol, formate, fumaric acid, propionic acid, succinic acid, valeric acid, and maleic acid. Gene deletions may be made as disclosed generally herein, and other approaches may also be used to achieve a desired decreased cellular production of selected fermentation products.

[0364] X. Separation and Purification of the Chemical Product 3-HP

[0365] When 3-HP is the chemical product, the 3-HP may be separated and purified by the approaches described in the following paragraphs, taking into account that many methods of separation and purification are known in the art and the following disclosure is not meant to be limiting. Osmotic shock, sonication, homogenization, and/or a repeated freeze-thaw cycle followed by filtration and/or centrifugation, among other methods, such as pH adjustment and heat treatment, may be used to produce a cell-free extract from intact cells. Any one or more of these methods also may be employed to release 3-HP from cells as an extraction step.

[0366] Further as to general processing of a bio-production broth comprising 3-HP, various methods may be practiced to remove biomass and/or separate 3-HP from the culture broth and its components. Methods to separate and/or concentrate the 3-HP include centrifugation, filtration, extraction, chemical conversion such as esterification, distillation (which may result in chemical conversion, such as dehydration to acrylic acid, under some reactive-distillation conditions), crystallization, chromatography, and ion-exchange, in various forms. Additionally, cell rupture may be conducted as needed to release 3-HP from the cell mass, such as by sonication, homogenization, pH adjustment or heating. 3-HP may be further separated and/or purified by methods known in the art, including any combination of one or more of centrifugation, liquid-liquid separations, including extractions such as solvent extraction, reactive extraction, two-phase aqueous extraction and two-phase solvent extraction, membrane separation technologies, distillation, evaporation, ion-exchange chromatography, adsorption chromatography, reverse phase chromatography and crystallization. Any of the above methods may be applied to a portion of a bio-production broth (i.e., a fermentation broth, whether made under aerobic, anaerobic, or microaerobic conditions), such as may be removed from a bio-production event gradually or periodically, or to the broth at termination of a bio-production event. Conversion of 3-HP to downstream products, such as described herein, may proceed after separation and purification, or, such as with distillation, thin-film evaporation, or wiped-film evaporation optionally also in part as a separation means.

[0367] For various of these approaches, one may apply a counter-current strategy, or a sequential or iterative strategy, such as multi-pass extractions. For example, a given aqueous solution comprising 3-HP may be repeatedly extracted with a non-polar phase comprising an amine to achieve multiple reactive extractions.

[0368] When a culture event (fermentation event) is at a point of completion, the spent broth may transferred to a separate tank, or remain in the culture vessel, and in either case the temperature may be elevated to at least 60° C. for a minimum of one hour in order to kill the microorganisms. (Alternatively, other approaches to killing the microorganisms may be practiced.) By spent broth is meant the final liquid volume comprising the initial nutrient media, cells grown from the microorganism inoculum (and possibly including some original cells of the inoculum), 3-HP, and optionally liquid additions made after providing the initial nutrient media, such as periodic additions to provide additional carbon source, etc. It is noted that the spent broth may comprise organic acids other than 3-HP, such as for example acetic acid and/or lactic acid.

[0369] A centrifugation step may then be practiced to filter out the biomass solids (e.g., microorganism cells). This may be achieved in a continuous or batch centrifuge, and solids removal may be at least about 80%, 85%, 90%, or 95% in a single pass, or cumulatively after two or more serial centrifugations.

[0370] An optional step is to polish the centrifuged liquid through a filter, such as microfiltration or ultrafiltration, or may comprise a filter press or other filter device to which is added a filter aid such as diatomaceous earth. Alternative or supplemental approaches to this and the centrifugation may include removal of cells by a flocculent, where the cells floc and are allowed to settle, and the liquid is drawn off or otherwise removed. A flocculent may be added to a fermentation broth after which settling of material is allowed for a time, and then separations may be applied, including but not limited to centrifugation.

[0371] After such steps, a spent broth comprising 3-HP and substantially free of solids is obtained for further processing. By “substantially free of solids” is meant that greater than 98%, 99%, or 99.5% of the solids have been removed.

[0372] In various embodiments this spent broth comprises various ions of salts, such as Na, Cl, SO₄, and PO₄. In some embodiments these ions may be removed by passing this spent broth through ion exchange columns, or otherwise contacting the spent broth with appropriate ion exchange material. Here and elsewhere in this document, “contacting” is taken to mean a contacting for the stated purpose by any way known to persons skilled in the art, such as, for example, in a column, under appropriate conditions that are well within the ability of persons of ordinary skill in the relevant art to determine. As but one example, these may comprise sequential contacting with anion and cation exchange materials (in any order), or with a mixed anion/cation material. This demineralization step should remove most such inorganic ions without removing the 3-HP. This may be achieved, for example, by lowering the pH sufficiently to protonate 3-HP and similar organic acids so that these acids are not bound to the anion exchange material, whereas anions, such as Cl and SO₄, that remain charged at such pH are removed from the solution by binding to the resin. Likewise, positively charged ions are removed by contacting with cation exchange material. Such removal of ions may be assessed by a decrease in conductivity of the solution. Such ion exchange materials may be regenerated by methods known to those skilled in the art.

[0373] In some embodiments, the spent broth (such as but not necessarily after the previous demineralization step) is subjected to a pH elevation, after which it is passed through an ion exchange column, or otherwise contacted with an ion exchange resin, that comprises anionic groups, such as amines, to which organic acids, ionic at this pH, associate. Other organics that do not so associate with amines at this pH (which may be over 6.5, over 7.5, over 8.5, over 9.5, over 10.5, or higher pH) may be separated from the organic acids at this stage, such as by flushing with an elevated pH rinse. Thereafter elution with a lower pH and/or elevated salt content rinse may remove the organic acids. Eluting with a gradient of decreasing pH and/or increasing salt content rinses may allow more distinct separation of 3-HP from other organic acids, thereafter simplifying further processing.

[0374] This latter step of anion-exchange resin retention of organic acids may be practiced before or after the demineralization step. However, the following two approaches are alternatives to the anion-exchange resin step.

[0375] A first alternative approach comprises reactive extraction (a form of liquid-liquid extraction) as exemplified in this and the following paragraphs. The spent broth, which may be at a stage before or after the demineralization step above, is combined with a quantity of a tertiary amine such as Alamine336® (Cognis Corp., Cincinnati, Ohio USA) at low pH. Co-solvents for the Alamine336 or other tertiary amine may be added and include, but are not limited to benzene, carbon tetrachloride, chloroform, cyclohexane, disobutyl ketone, ethanol, #2 fuel oil, isopropanol, kerosene, n-butanol, isobutanol, octanol, and n-decanol that increase the partition coefficient when combined with the amine. After appropriate mixing a period of time for phase separation transpires, after which the non-polar phase, which comprises 3-HP associated with the Alamine336 or other tertiary amine, is separated from the aqueous phase.

[0376] When a co-solvent is used that has a lower boiling point than the 3-HP/tertiary amine, a distilling step may be used to remove the co-solvent, thereby leaving the 3-HP-tertiary amine complex in the non-polar phase.

[0377] Whether or not there is such a distillation step, a stripping or recovery step may be used to separate the 3-HP from the tertiary amine. An inorganic salt, such as ammonium sulfate, sodium chloride, or sodium carbonate, or a base such as sodium hydroxide or ammonium hydroxide, is added to the 3-HP/tertiary amine to reverse the amine protonation reaction, and a second phase is provided by addition of an aqueous solution (which may be the vehicle for provision of the inorganic salt). After suitable mixing, two phases result and this allows for tertiary amine regeneration and re-use, and provides the 3-HP in an aqueous solution. Alternatively, hot water may also be used without a salt or base to recover the 3HP from the amine.

[0378] In the above approach the phase separation and extraction of 3-HP to the aqueous phase can serve to concentrate the 3-HP. It is noted that chromatographic separation of respective organic acids also can serve to concentrate such acids, such as 3-HP. In similar approaches other suitable, non-polar amines, which may include primary, secondary and quaternary amines, may be used instead of and/or in combination with a tertiary amine.

[0379] A second alternative approach is crystallization. For example, the spent broth (such as free of biomass solids) may be contacted with a strong base such as ammonium hydroxide, which results in formation of an ammonium salt of 3-HP. This may be concentrated, and then ammonium-3-HP crystals are formed and may be separated, such as by filtration, from the aqueous phase. Once collected, ammonium-3-HP crystals may be treated with an acid, such as sulfuric acid, so that ammonium sulfate is regenerated, so that 3-HP and ammonium sulfate result.

[0380] Also, various aqueous two-phase extraction methods may be utilized to separate and/or concentrate a desired chemical product from a fermentation broth or later-obtained solution. It is known that the addition of polymers, such as dextran and glycol polymers, such as polyethylene glycol (PEG) and polypropylene glycol (PPG) to an aqueous solution may result in formation of two aqueous phases. In such systems a desired chemical product may segregate to one phase while cells and other chemicals partition to the other phase, thus providing for a separation without use of organic solvents. This approach has been demonstrated for some chemical products, but challenges associated with chemical product recovery from a polymer solution and low selectivities are recognized (See “Extractive Recovery of Products from Fermentation Broths,” Joong Kyun Kim et al., Biotechnol. Bioprocess Eng., 1999(4)1-11, incorporated by reference for all of its teachings of extractive recovery methods).

[0381] Various substitutions and combinations of the above steps and processes may be made to obtain a relatively purified 3-HP solution. Also, methods of separation and purification disclosed in U.S. Pat. No. 6,534,679, issued Mar. 18, 2003, and incorporated by reference herein for such methods disclosures, may be considered based on a particular processing scheme. Also, in some culture events periodic removal of a portion of the liquid volume may be made, and processing of such portion(s) may be made to recover the 3-HP, including by any combination of the approaches disclosed above.

[0382] As noted, solvent extraction is another alternative. This may use any of a number of and/or combinations of solvents, including alcohols, esters, ketones, and various organic solvents. Without being limiting, after phase separation a distillation step or a secondary extraction may be employed to separate 3-HP from the organic phase.

[0383] The following published resources are incorporated by reference herein for their respective teachings to indicate the level of skill in these relevant arts, and as needed to support a disclosure that teaches how to make and use methods of industrial bio-production of 3-HP, and also industrial systems that may be used to achieve such conversion with any of the recombinant microorganisms of the present invention (Biochemical Engineering Fundamentals, 2^{nd} Ed. J. E. Bailey and D. F. Ollis, McGraw Hill, New York, 1986, entire book for purposes indicated and Chapter 9, pp. 533-657 in particular for biological reactor design; Unit Operations of Chemical Engineering, 5^{th} E a W. L. McCabe et al., McGraw Hill, New York 1993, entire book for purposes indicated, and particularly for process and separation technologies analyses; Equilibrium Staged Separations, P. C. Wankat, Prentice Hall, Englewood Cliffs, N.J. USA, 1988, entire book for separation technologies teachings).

[0384] XI. Conversion of 3-HP to Acrylic Acid and Downstream Products

[0385] As discussed herein, various embodiments described herein are related to production of a particular chemical product, 3-hydroxypropionic acid (3-HP). This organic acid, 3-HP, may be converted to various other products having industrial uses, such as but not limited to acrylic acid, esters of acrylic acid, and other chemicals obtained from 3-HP, referred to as “downstream products.” Under some approaches the 3-HP may be converted to acrylic acid, acrylamide, and/or other downstream chemical products, in some instances the conversion being associated with the separation and/or purification steps. Many conversions to such downstream products are described herein. The methods of the invention include steps to produce downstream products of 3-HP.

[0386] As a C₃ building block, 3-HP offers much potential in a variety of chemical conversions to commercially important intermediates, industrial end products, and consumer products. For example, 3-HP may be converted to acrylic acid, acrylates (e.g., acrylic acid salts and esters), 1,3-propanediol, malonic acid, ethyl-3-hydroxypropionate, ethyl ethoxy propionate, propiolactone, acrylamide, or acrylonitrile.

[0387] For example, methyl acrylate may be made from 3-HP via dehydration and esterification, the latter to add a methyl group (such as using methanol); acrylamide may be made from 3-HP via dehydration and amidation reactions; acrylonitrile may be made via a dehydration reaction and forming a nitrile moiety; propriolactone may be made from 3-HP via a ring-forming internal esterification reaction (eliminating a water molecule); ethyl-3-HP may be made from 3-HP via esterification with ethanol; malonic acid may be made from 3-HP via an oxidation reaction; and 1,3-propanediol may be made from 3-HP via a reduction reaction. Also, acrylic acid, first converted from 3-HP by dehydration, may be esterified with appropriate compounds to form a number of commercially important acrylate-based esters, including but not limited to methyl acrylate, ethyl acrylate, methyl acrylate, 2-ethylhexyl acrylate, butyl acrylate, and lauryl acrylate. Alternatively, 3HP may be esterified to form an ester of 3HP and then dehydrated to form the acrylate ester.

[0388] Additionally, 3-HP may be oligomerized or polymerized to form poly(3-hydroxypropionate) homopolymers, or co-polymerized with one or more other monomers to form various co-polymers. Because 3-HP has only a single stereoisomer, polymerization of 3-HP is not complicated by the stereo-specificity of monomers during chain growth. This is in contrast to (S)-2-Hydroxypropanoic acid (also known as lactic acid), which has two (D, L) stereoisomers that must be considered during its polymerizations.

[0389] As will be further described, 3-HP can be converted into derivatives starting (i) substantially as the protonated form of 3-hydroxypropionic acid; (ii) substantially as the deprotonated form, 3-hydroxypropionate; or (iii) as mixtures of the protonated and deprotonated forms. Generally, the fraction of 3-HP present as the acid versus the salt will depend on the pH, the presence of other ionic species in solution, temperature (which changes the equilibrium constant relating the acid and salt forms), and to some extent pressure. Many chemical conversions may be carried out from either of the 3-HP forms, and overall process economics will typically dictate the form of 3-HP for downstream conversion.

[0390] Also, as an example of a conversion during separation, 3-HP in an amine salt form, such as in the extraction step herein disclosed using Alamine 336 as the amine, may be converted to acrylic acid by contacting a solution comprising the 3-HP amine salt with a dehydration catalyst, such as aluminum oxide, at an elevated temperature, such as 170 to 180 C, or 180 to 190 C, or 190 to 200 C, and passing the collected vapor phase over a low temperature condenser. Operating conditions, including 3-HP concentration, organic amine, co-solvent (if any), temperature, flow rates, dehydration catalyst, and condenser temperature, are evaluated and improved for commercial purposes. Conversion of 3-HP to acrylic acid is expected to exceed at least 80 percent, or at least 90 percent, in a single conversion event. The amine may be re-used, optionally after clean-up. Other dehydration catalysts, as provided herein, may be evaluated. It is noted that U.S. Pat. No. 7,186,856 discloses data regarding this conversion approach, albeit as part of an extractive salt-splitting conversion that differs from the teachings herein. However, U.S. Pat. No. 7,186,856 is incorporated by reference for its methods, including extractive salt-splitting, the latter to further indicate the various ways 3-HP may be extracted from a microbial fermentation broth.

[0391] Further as to embodiments in which the chemical product being synthesized by the microorganism host cell is 3-HP, made as provided herein and optionally purified to a selected purity prior to conversion, the methods of the present invention can also be used to produce “downstream” compounds derived from 3-HP, such as polymerized-3-HP (poly-3-HP), acrylic acid, polyacrylic acid (polymerized acrylic acid, in various forms), methyl acrylate, acrylamide, acrylonitrile, propiolactone, ethyl 3-HP, malonic acid, and 1,3-propanediol. Numerous approaches may be employed for such downstream conversions, generally falling into enzymatic, catalytic (chemical conversion process using a catalyst), thermal, and combinations thereof (including some wherein a desired pressure is applied to accelerate a reaction).

[0392] As noted, an important industrial chemical product that may be produced from 3-HP is acrylic acid. Chemically, one of the carbon-carbon single bonds in 3-HP must undergo a dehydration reaction, converting to a carbon-carbon double bond and rejecting a water molecule. Dehydration of 3-HP in principle can be carried out in the liquid phase or in the gas phase. In some embodiments, the dehydration takes place in the presence of a suitable homogeneous or heterogeneous catalyst. Suitable dehydration catalysts are both acid and alkaline catalysts. Following dehydration, an acrylic acid-containing phase is obtained and can be purified where appropriate by further purification steps, such as by distillation methods, extraction methods, or crystallization methods, or combinations thereof.

[0393] Making acrylic acid from 3-HP via a dehydration reaction may be achieved by a number of commercial methodologies including via a distillation process, which may be part of the separation regime and which may include an acid and/or a metal ion as catalyst. More broadly, incorporated herein for its teachings of conversion of 3-HP, and other β-hydroxy carbonyl compounds, to acrylic acid and other related downstream compounds, is U.S. Patent Publication No. 2007/0219390 A1, published Sep. 20, 2007, now abandoned. This publication lists numerous catalysts and provides examples of conversions, which are specifically incorporated herein. Also among the various specific methods to dehydrate 3-HP to produce acrylic acid is an older method, described in U.S. Pat. No. 2,469,701 (Redmon). This reference teaches a method for the preparation of acrylic acid by heating 3-HP to a temperature between 130 and 190° C., in the presence of a dehydration catalyst, such as sulfuric acid or phosphoric acid, under reduced pressure. U.S. Patent Publication No. 2005/0222458 A1 (Craciun et al.) also provides a process for the preparation of acrylic acid by heating 3-HP or its derivatives. Vapor-phase dehydration of 3-HP occurs in the presence of dehydration catalysts, such as packed beds of silica, alumina, or titania. These patent publications are incorporated by reference for their methods relating to converting 3-HP to acrylic acid.

[0394] The dehydration catalyst may comprise one or more metal oxides, such as Al₂O₃, SiO₂, or TiO₂. In some embodiments, the dehydration catalyst is a high surface area Al₂O₃ or a high surface area silica wherein the silica is substantially SiO₂. High surface area for the purposes of the invention means a surface area of at least about 50, 75, 100 m²/g, or more. In some embodiments, the dehydration catalyst may comprise an aluminosilicate, such as a zeolite.

[0395] For example, including as exemplified from such incorporated references, 3-HP may be dehydrated to acrylic acid via various specific methods, each often involving one or more dehydration catalysts. One catalyst of particular apparent value is titanium, such as in the form of titanium oxide, TiO(2). A titanium dioxide catalyst may be provided in a dehydration system that distills an aqueous solution comprising 3-HP, wherein the 3-HP dehydrates, such as upon volatilization, converting to acrylic acid, and the acrylic acid is collected by condensation from the vapor phase.

[0396] As but one specific method, an aqueous solution of 3-HP is passed through a reactor column packed with a titanium oxide catalyst maintained at a temperature between 170 and 190 C and at ambient atmospheric pressure. Vapors leaving the reactor column are passed over a low temperature condenser, where acrylic acid is collected. The low temperature condenser may be cooled to 30 C or less, 2 C or less, or at any suitable temperature for efficient condensation based on the flow rate and design of the system. Also, the reactor column temperatures may be lower, for instance when operating at a pressure lower than ambient atmospheric pressure. It is noted that Example 1 of U.S. Patent Publication No. 2007/0219390, published Sep. 20, 2007, now abandoned, provides specific parameters that employs the approach of this method. As noted, this publication is incorporated by reference for this teaching and also for its listing of catalysts that may be used in a 3-HP to acrylic acid dehydration reaction.

[0397] Further as to dehydration catalysts, the following table summarizes a number of catalysts (including chemical classes) that may be used in a dehydration reaction from 3-HP (or its esters) to acrylic acid (or acrylate esters). Such catalysts, some of which may be used in any of solid, liquid or gaseous forms, may be used individually or in any combination. This listing of catalysts is not intended to be limiting, and many specific catalysts not listed may be used for specific dehydration reactions. Further without being limiting, catalyst selection may depend on the solution pH and/or the form of 3-HP in a particular conversion, so that an acidic catalyst may be used when 3-HP is in acidic form, and a basic catalyst may be used when the ammonium salt of 3-HP is being converted to acrylic acid. Also, some catalysts may be in the form of ion exchange resins.

TABLE 8
Dehydration Catalysts

| Catalyst by | |
|---|---|
| Chemical Class | Non-limiting Examples |
| Acids (including | H₂SO₄, HCl, titanic acids, metal oxide hydrates, |
| weak and strong) | metal sulfates (MSO₄,. where M═Zn, Sn, Ca, Ba, |
| | Ni, Co, or other transition metals), metal oxide |
| | sulfates, metal phosphates (e.g., M₃,(PO₄) ₂, where |
| | M═Ca, Ba), metal phosphates, metal oxide |
| | phosphates, carbon (e.g., transition metals on a |
| | carbon support), mineral acids, carboxylic acids, |
| | salts thereof, acidic resins, acidic zeolites, clays, |
| | SiO₂/H₃PO₄, fluorinated Al₂O₃, Nb₂O₃/PO₅⁻³, |
| | Nb₂O₃/SO₄⁻², Nb₂O₅H₂O, phosphotungstic acids, |
| | phosphomolybdic acids, silicomolybdic acids, |
| | silicotungstic acids, carbon dioxide |
| Bases (including | NaOH, ammonia, polyvinylpyridine, metal |
| weak and strong) | hydroxides, Zr(OH)₄, and substituted amines |
| Oxides (generally | TiO₂, ZrO₂, Al₂O₃, SiO₂, ZnO₂, SnO₂, WO₃, |
| metal oxides) | MnO₂, Fe₂O₃, V₂O₅ |

[0398] As to another specific method using one of these catalysts, concentrated sulfuric acid and an aqueous solution comprising 3-HP are separately flowed into a reactor maintained at 150 to 165° C. at a reduced pressure of 100 mm Hg. Flowing from the reactor is a solution comprising acrylic acid. A specific embodiment of this method, disclosed in Example 1 of US2009/0076297, incorporated by reference herein, indicates a yield of acrylic acid exceeding 95 percent.

[0399] Based on the wide range of possible catalysts and knowledge in the art of dehydration reactions of this type, numerous other specific dehydration methods may be evaluated and implemented for commercial production.

[0400] The dehydration of 3-HP may also take place in the absence of a dehydration catalyst. For example, the reaction may be run in the vapor phase in the presence of a nominally inert packing such as glass, ceramic, a resin, porcelain, plastic, metallic or brick dust packing and still form acrylic acid in reasonable yields and purity. The catalyst particles can be sized and configured such that the chemistry is, in some embodiments, mass-transfer-limited or kinetically limited. The catalyst can take the form of powder, pellets, granules, beads, extrudates, and so on. When a catalyst support is optionally employed, the support may assume any physical form such as pellets, spheres, monolithic channels, etc. The supports may be co-precipitated with active metal species; or the support may be treated with the catalytic metal species and then used as is or formed into the aforementioned shapes; or the support may be formed into the aforementioned shapes and then treated with the catalytic species.

[0401] A reactor for dehydration of 3-HP may be engineered and operated in a wide variety of ways. The reactor operation can be continuous, semi-continuous, or batch. It is perceived that an operation that is substantially continuous and at steady state is advantageous from operations and economics perspectives. The flow pattern can be substantially plug flow, substantially well-mixed, or a flow pattern between these extremes. A “reactor” can actually be a series or network of several reactors in various arrangements.

[0402] For example, without being limiting, acrylic acid may be made from 3-HP via a dehydration reaction, which may be achieved by a number of commercial methodologies including via a distillation process, which may be part of the separation regime and which may include an acid and/or a metal ion as catalyst. More broadly, incorporated herein for its teachings of conversion of 3-HP, and other β-hydroxy carbonyl compounds, to acrylic acid and other related downstream compounds, is U.S. Patent Publication No. 2007/0219390 A1, published Sep. 20, 2007, now abandoned. This publication lists numerous catalysts and provides examples of conversions, which are specifically incorporated herein.

[0403] For example, including as exemplified from such incorporated references, 3-HP may be dehydrated to acrylic acid via various specific methods, each often involving one or more dehydration catalysts. One catalyst of particular apparent value is titanium, such as in the form of titanium oxide, TiO₂. A titanium dioxide catalyst may be provided in a dehydration system that distills an aqueous solution comprising 3-HP, wherein the 3-HP dehydrates, such as upon volatilization, converting to acrylic acid, and the acrylic acid is collected by condensation from the vapor phase.

[0404] As but one specific method, an aqueous solution of 3-HP is passed through a reactor column packed with a titanium oxide catalyst maintained at a temperature between 170 and 190° C. and at ambient atmospheric pressure. Vapors leaving the reactor column are passed over a low temperature condenser, where acrylic acid is collected. The low temperature condenser may be cooled to 30° C. or less, 20° C. or less, 2° C. or less, or at any suitable temperature for efficient condensation based on the flow rate and design of the system. Also, the reactor column temperatures may be lower, for instance when operating at a pressure lower than ambient atmospheric pressure. It is noted that Example 1 of U.S. Patent Publication No. 2007/0219390, published Sep. 20, 2007, now abandoned, provides specific parameters that employs the approach of this method. As noted, this publication is incorporated by reference for this teaching and also for its listing of catalysts that may be used in a 3-HP to acrylic acid dehydration reaction.

[0405] Crystallization of the acrylic acid obtained by dehydration of 3-HP may be used as one of the final separation/purification steps. Various approaches to crystallization are known in the art, including crystallization of esters.

[0406] As noted above, in some embodiments, a salt of 3-HP is converted to acrylic acid or an ester or salt thereof. For example, U.S. Pat. No. 7,186,856 (Meng et al.) teaches a process for producing acrylic acid from the ammonium salt of 3-HP, which involves a first step of heating the ammonium salt of 3-HP in the presence of an organic amine or solvent that is immiscible with water, to form a two-phase solution and split the 3-HP salt into its respective ionic constituents under conditions which transfer 3-HP from the aqueous phase to the organic phase of the solution, leaving ammonia and ammonium cations in the aqueous phase. The organic phase is then back-extracted to separate the 3-HP, followed by a second step of heating the 3-HP-containing solution in the presence of a dehydration catalyst to produce acrylic acid. U.S. Pat. No. 7,186,856 is incorporated by reference for its methods for producing acrylic acid from salts of 3-HP. Various alternatives to the particular approach disclosed in this patent may be developed for suitable extraction and conversion processes.

[0407] Methyl acrylate may be made from 3-HP via dehydration and esterification, the latter to add a methyl group (such as using methanol), acrylamide may be made from 3-HP via dehydration and amidation reactions, acrylonitrile may be made via a dehydration reaction and forming a nitrile moiety, propriolactone may be made from 3-HP via a ring-forming internal esterification reaction (eliminating a water molecule), ethyl-3-HP may be made from 3-HP via esterification with ethanol, malonic acid may be made from 3-HP via an oxidation reaction, and 1,3-propanediol may be made from 3-HP via a reduction reaction.

[0408] Malonic acid may be produced from oxidation of 3-HP as produced herein. U.S. Pat. No. 5,817,870 (Haas et al.) discloses catalytic oxidation of 3-HP by a precious metal selected from Ru, Rh, Pd, Os, Ir or Pt. These can be pure metal catalysts or supported catalysts. The catalytic oxidation can be carried out using a suspension catalyst in a suspension reactor or using a fixed-bed catalyst in a fixed-bed reactor. If the catalyst, such as a supported catalyst, is disposed in a fixed-bed reactor, the latter can be operated in a trickle-bed procedure as well as also in a liquid-phase procedure. In the trickle-bed procedure the aqueous phase comprising the 3-HP starting material, as well as the oxidation products of the same and means for the adjustment of pH, and oxygen or an oxygen-containing gas can be conducted in parallel flow or counter-flow. In the liquid-phase procedure the liquid phase and the gas phase are conveniently conducted in parallel flow.

[0409] In order to achieve a sufficiently short reaction time, the conversion is carried out at a pH equal or greater than 6, such as at least 7, and in particular between 7.5 and 9. According to a particular embodiment, during the oxidation reaction the pH is kept constant, such as at a pH in the range between 7.5 and 9, by adding a base, such as an alkaline or alkaline earth hydroxide solution. The oxidation is usefully carried out at a temperature of at least 10° C. and maximally 70° C. The flow of oxygen is not limited. In the suspension method it is important that the liquid and the gaseous phase are brought into contact by stirring vigorously. Malonic acid can be obtained in nearly quantitative yields. U.S. Pat. No. 5,817,870 is incorporated by reference herein for its methods to oxidize 3-HP to malonic acid.

[0410] 1,3-Propanediol may be produced from hydrogenation of 3-HP as produced herein. U.S. Patent Publication No. 2005/0283029 (Meng et al.) is incorporated by reference herein for its methods to hydrogenation of 3-HP, or esters of the acid or mixtures, in the presence of a specific catalyst, in a liquid phase, to prepare 1,3-propanediol. Possible catalysts include ruthenium metal, or compounds of ruthenium, supported or unsupported, alone or in combination with at least one or more additional metal(s) selected from molybdenum, tungsten, titanium, zirconium, niobium, vanadium or chromium. The ruthenium metal or compound thereof, and/or the additional metal(s), or compound thereof, may be utilized in supported or unsupported form. If utilized in supported form, the method of preparing the supported catalyst is not critical and can be any technique such as impregnation of the support or deposition on the support. Any suitable support may be utilized. Supports that may be used include, but are not limited to, alumina, titania, silica, zirconia, carbons, carbon blacks, graphites, silicates, zeolites, aluminosilicate zeolites, aluminosilicate clays, and the like.

[0411] The hydrogenation process may be carried out in liquid phase. The liquid phase includes water, organic solvents that are not hydrogenatable, such as any aliphatic or aromatic hydrocarbon, alcohols, ethers, toluene, decalin, dioxane, diglyme, n-heptane, hexane, xylene, benzene, tetrahydrofuran, cyclohexane, methylcyclohexane, and the like, and mixtures of water and organic solvent(s). The hydrogenation process may be carried out batch wise, semi-continuously, or continuously. The hydrogenation process may be carried out in any suitable apparatus. Exemplary of such apparatus are stirred tank reactors, trickle-bed reactors, high pressure hydrogenation reactors, and the like.

[0412] The hydrogenation process is generally carried out at a temperature ranging from about 20 to about 250° C., more particularly from about 100 to about 200° C. Further, the hydrogenation process is generally carried out in a pressure range of from about 20 psi to about 4000 psi. The hydrogen containing gas utilized in the hydrogenation process is, optionally, commercially pure hydrogen. The hydrogen containing gas is usable if nitrogen, gaseous hydrocarbons, or oxides of carbon, and similar materials, are present in the hydrogen containing gas. For example, hydrogen from synthesis gas (hydrogen and carbon monoxide) may be employed, such synthesis gas potentially further including carbon dioxide, water, and various impurities.

[0413] As is known in the art, it is also possible to convert 3-HP to 1,3-propanediol using biological methods. For example, 1,3-propanediol can be created from either 3-HP-CoA or 3-HP via the use of polypeptides having enzymatic activity. These polypeptides can be used either in vitro or in vivo. When converting 3-HP-CoA to 1,3-propanediol, polypeptides having oxidoreductase activity or reductase activity (e.g., enzymes from the 1.1.1.-class of enzymes) can be used. Alternatively, when creating 1,3-propanediol from 3-HP, a combination of a polypeptide having aldyhyde dehydrogenase activity (e.g., an enzyme from the 1.1.1.34 class) and a polypeptide having alcohol dehydrogenase activity (e.g., an enzyme from the 1.1.1.32 class) can be used.

[0414] Another downstream production of 3-HP, acrylonitrile, may be converted from acrylic acid by various organic syntheses, including by not limited to the Sohio acrylonitrile process, a single-step method of production known in the chemical manufacturing industry

[0415] Also, addition reactions may yield acrylic acid or acrylate derivatives having alkyl or aryl groups at the carbonyl hydroxyl group. Such additions may be catalyzed chemically, such as by hydrogen, hydrogen halides, hydrogen cyanide, or Michael additions under alkaline conditions optionally in the presence of basic catalysts. Alcohols, phenols, hydrogen sulfide, and thiols are known to add under basic conditions. Aromatic amines or amides, and aromatic hydrocarbons, may be added under acidic conditions. These and other reactions are described in Ulmann's Encyclopedia of Industrial Chemistry, Acrylic Acid and Derivatives, WileyVCH Verlag GmbH, Wienham (2005), incorporated by reference for its teachings of conversion reactions for acrylic acid and its derivatives.

[0416] Acrylic acid obtained from 3-HP made by the present invention may be further converted to various chemicals, including polymers, which are also considered downstream products in some embodiments. Acrylic acid esters may be formed from acrylic acid (or directly from 3-HP) such as by condensation esterification reactions with an alcohol, releasing water. This chemistry described in Monomeric Acrylic Esters, E. H. Riddle, Reinhold, N.Y. (1954), incorporated by reference for its esterification teachings. Among esters that are formed are methyl acrylate, ethyl acrylate, n-butyl acrylate, hydroxypropyl acrylate, hydroxyethyl acrylate, isobutyl acrylate, and 2-ethylhexyl acrylate, and these and/or other acrylic acid and/or other acrylate esters may be combined, including with other compounds, to form various known acrylic acid-based polymers. Although acrylamide is produced in chemical syntheses by hydration of acrylonitrile, herein a conversion may convert acrylic acid to acrylamide by amidation.

[0417] Acrylic acid obtained from 3-HP made by the present invention may be further converted to various chemicals, including polymers, which are also considered downstream products in some embodiments. Acrylic acid esters may be formed from acrylic acid (or directly from 3-HP) such as by condensation esterification reactions with an alcohol, releasing water. This chemistry is described in Monomeric Acrylic Esters, E. H. Riddle, Reinhold, N.Y. (1954), incorporated by reference for its esterification teachings. Among esters that are formed are methyl acrylate, ethyl acrylate, n-butyl acrylate, hydroxypropyl acrylate, hydroxyethyl acrylate, isobutyl acrylate, and 2-ethylhexyl acrylate, and these and/or other acrylic acid and/or other acrylate esters may be combined, including with other compounds, to form various known acrylic acid-based polymers. Although acrylamide is produced in chemical syntheses by hydration of acrylonitrile, herein a conversion may convert acrylic acid to acrylamide by amidation.

[0418] Direct esterification of acrylic acid can take place by esterification methods known to the person skilled in the art, by contacting the acrylic acid obtained from 3-HP dehydration with one or more alcohols, such as methanol, ethanol, 1-propanol, 2-propanol, n-butanol, tert-butanol or isobutanol, and heating to a temperature of at least 50, 75, 100, 125, or 150° C. The water formed during esterification may be removed from the reaction mixture, such as by azeotropic distillation through the addition of suitable separation aids, or by another means of separation. Conversions up to 95%, or more, may be realized, as is known in the art.

[0419] Several suitable esterification catalysts are commercially available, such as from Dow Chemical (Midland, Mich. US). For example, Amberlyst™ 131Wet Monodisperse gel catalyst confers enhanced hydraulic and reactivity properties and is suitable for fixed bed reactors. Amberlyst™ 39Wet is a macroreticular catalyst suitable particularly for stirred and slurry loop reactors. Amberlyst™ 46 is a macroporous catalyst producing less ether byproducts than conventional catalyst (as described in U.S. Pat. No. 5,426,199 to Rohm and Haas, which patent is incorporated by reference for its teachings of esterification catalyst compositions and selection considerations).

[0420] Acrylic acid, and any of its esters, may be further converted into various polymers. Polymerization may proceed by any of heat, light, other radiation of sufficient energy, and free radical generating compounds, such as azo compounds or peroxides, to produce a desired polymer of acrylic acid or acrylic acid esters. As one example, an aqueous acrylic acid solution's temperature raised to a temperature known to start polymerization (in part based on the initial acrylic acid concentration), and the reaction proceeds, the process frequently involving heat removal given the high exothermicity of the reaction. Many other methods of polymerization are known in the art. Some are described in Ulmann's Encyclopedia of Industrial Chemistry, Polyacrylamides and Poly(Acrylic Acids), WileyVCH Verlag GmbH, Wienham (2005), incorporated by reference for its teachings of polymerization reactions.

[0421] For example, the free-radical polymerization of acrylic acid takes place by polymerization methods known to the skilled worker and can be carried out either in an emulsion or suspension in aqueous solution or another solvent. Initiators, such as but not limited to organic peroxides, often are added to aid in the polymerization. Among the classes of organic peroxides that may be used as initiators are diacyls, peroxydicarbonates, monoperoxycarbonates, peroxyketals, peroxyesters, dialkyls, and hydroperoxides. Another class of initiators is azo initiators, which may be used for acrylate polyermization as well as co-polymerization with other monomers. U.S. Pat. Nos. 5,470,928; 5,510,307; 6,709,919; and 7,678,869 teach various approaches to polymerization using a number of initiators, including organic peroxides, azo compounds, and other chemical types, and are incorporated by reference for such teachings as applicable to the polymers described herein.

[0422] Accordingly, it is further possible for co-monomers, such as crosslinkers, to be present during the polymerization. The free-radical polymerization of the acrylic acid obtained from dehydration of 3-HP, as produced herein, in at least partly neutralized form and in the presence of crosslinkers is practiced in certain embodiments. This polymerization may result in hydrogels which can then be comminuted, ground and, where appropriate, surface-modified, by known techniques.

[0423] An important commercial use of polyacrylic acid is for superabsorbent polymers. This specification hereby incorporates by reference Modern Superabsorbent Polymer Technology, Buchholz and Graham (Editors), Wiley-VCH, 1997, in its entirety for its teachings regarding superabsorbent polymers components, manufacture, properties and uses. Superabsorbent polymers are primarily used as absorbents for water and aqueous solutions for diapers, adult incontinence products, feminine hygiene products, and similar consumer products. In such consumer products, superabsorbent materials can replace traditional absorbent materials such as cloth, cotton, paper wadding, and cellulose fiber. Superabsorbent polymers absorb, and retain under a slight mechanical pressure, up to 25 times or their weight in liquid. The swollen gel holds the liquid in a solid, rubbery state and prevents the liquid from leaking. Superabsorbent polymer particles can be surface-modified to produce a shell structure with the shell being more highly crosslinked. This technique improves the balance of absorption, absorption under load, and resistance to gel-blocking. It is recognized that superabsorbent polymers have uses in fields other than consumer products, including agriculture, horticulture, and medicine.

[0424] Superabsorbent polymers are prepared from acrylic acid (such as acrylic acid derived from 3-HP provided herein) and a crosslinker, by solution or suspension polymerization. Exemplary methods include U.S. Pat. Nos. 5,145,906; 5,350,799; 5,342,899; 4,857,610; 4,985,518; 4,708,997; 5,180,798; 4,666,983; 4,734,478; and 5,331,059, each incorporated by reference for their teachings relating to superabsorbent polymers.

[0425] Among consumer products, a diaper, a feminine hygiene product, and an adult incontinence product are made with superabsorbent polymer that itself is made substantially from acrylic acid converted from 3-HP made in accordance with the present invention.

[0426] Diapers and other personal hygiene products may be produced that incorporate superabsorbent polymer made from acrylic acid made from 3-HP which is bio-produced by the teachings of the present application. The following provides general guidance for making a diaper that incorporates such superabsorbent polymer. The superabsorbent polymer first is prepared into an absorbent pad that may be vacuum formed, and in which other materials, such as a fibrous material (e.g., wood pulp) are added. The absorbent pad then is assembled with sheet(s) of fabric, generally a nonwoven fabric (e.g., made from one or more of nylon, polyester, polyethylene, and polypropylene plastics) to form diapers.

[0427] More particularly, in one non-limiting process, above a conveyer belt multiple pressurized nozzles spray superabsorbent polymer particles (such as about 400 micron size or larger), fibrous material, and/or a combination of these onto the conveyer belt at designated spaces/intervals. The conveyor belt is perforated and under vacuum from below, so that the sprayed on materials are pulled toward the belt surface to form a flat pad. In various embodiments, fibrous material is applied first on the belt, followed by a mixture of fibrous material and the superabsorbent polymer particles, followed by fibrous material, so that the superabsorbent polymer is concentrated in the middle of the pad. A leveling roller may be used toward the end of the belt path to yield pads of uniform thickness. Each pad thereafter may be further processed, such as to cut it to a proper shape for the diaper, or the pad may be in the form of a long roll sufficient for multiple diapers. Thereafter, the pad is sandwiched between a top sheet and a bottom sheet of fabric (one generally being liquid pervious, the other liquid impervious), such as on a conveyor belt, and these are attached together such as by gluing, heating or ultrasonic welding, and cut into diaper-sized units (if not previously so cut). Additional features may be provided, such as elastic components, strips of tape, etc., for fit and ease of wearing by a person.

[0428] The ratio of the fibrous material to polymer particles is known to effect performance characteristics. In some embodiments, this ratio is between 75:25 and 90:10 (see U.S. Pat. No. 4,685,915, incorporated by reference for its teachings of diaper manufacture). Other disposable absorbent articles may be constructed in a similar fashion, such as for adult incontinence, feminine hygiene (sanitary napkins), tampons, etc. (see, for example, U.S. Pat. Nos. 5,009,653, 5,558,656, and 5,827,255 incorporated by reference for their teachings of sanitary napkin manufacture).

[0429] Low molecular-weight polyacrylic acid has uses for water treatment, flocculants, and thickeners for various applications including cosmetics and pharmaceutical preparations. For these applications, the polymer may be uncrosslinked or lightly crosslinked, depending on the specific application. The molecular weights are typically from about 200 to about 1,000,000 g/mol. Preparation of these low molecular-weight polyacrylic acid polymers is described in U.S. Pat. Nos. 3,904,685; 4,301,266; 2,798,053; and 5,093,472, each of which is incorporated by reference for its teachings relating to methods to produce these polymers.

[0430] Acrylic acid may be co-polymerized with one or more other monomers selected from acrylamide, 2-acrylamido-2-methylpropanesulfonic acid, N,N-dimethylacrylamide, N-isopropylacrylamide, methacrylic acid, and methacrylamide, to name a few. The relative reactivities of the monomers affect the microstructure and thus the physical properties of the polymer. Co-monomers may be derived from 3-HP, or otherwise provided, to produce co-polymers. Ulmann's Encyclopedia of Industrial Chemistry, Polyacrylamides and Poly(Acrylic Acids), WileyVCH Verlag GmbH, Wienham (2005), is incorporated by reference herein for its teachings of polymer and co-polymer processing.

[0431] Acrylic acid can in principle be copolymerized with almost any free-radically polymerizable monomers including styrene, butadiene, acrylonitrile, acrylic esters, maleic acid, maleic anhydride, vinyl chloride, acrylamide, itaconic acid, and so on. End-use applications typically dictate the co-polymer composition, which influences properties. Acrylic acid also may have a number of optional substitutions on it, and after such substitutions be used as a monomer for polymerization, or co-polymerization reactions. As a general rule, acrylic acid (or one of its co-polymerization monomers) may be substituted by any substituent that does not interfere with the polymerization process, such as alkyl, alkoxy, aryl, heteroaryl, benzyl, vinyl, allyl, hydroxy, epoxy, amide, ethers, esters, ketones, maleimides, succinimides, sulfoxides, glycidyl and silyl (see U.S. Pat. No. 7,678,869, incorporated by reference above, for further discussion). The following paragraphs provide a few non-limiting examples of copolymerization applications.

[0432] Paints that comprise polymers and copolymers of acrylic acid and its esters are in wide use as industrial and consumer products. Aspects of the technology for making such paints can be found in U.S. Pat. Nos. 3,687,885 and 3,891,591, incorporated by reference for its teachings of such paint manufacture. Generally, acrylic acid and its esters may form homopolymers or copolymers among themselves or with other monomers, such as amides, methacrylates, acrylonitrile, vinyl, styrene and butadiene. A desired mixture of homopolymers and/or copolymers, referred to in the paint industry as ‘vehicle’ (or ‘binder’) are added to an aqueous solution and agitated sufficiently to form an aqueous dispersion that includes sub-micrometer sized polymer particles. The paint cures by coalescence of these ‘vehicle’ particles as the water and any other solvent evaporate. Other additives to the aqueous dispersion may include pigment, filler (e.g., calcium carbonate, aluminum silicate), solvent (e.g., acetone, benzol, alcohols, etc., although these are not found in certain no VOC paints), thickener, and additional additives depending on the conditions, applications, intended surfaces, etc. In many paints, the weight percent of the vehicle portion may range from about nine to about 26 percent, but for other paints the weight percent may vary beyond this range.

[0433] Acrylic-based polymers are used for many coatings in addition to paints. For example, for paper coating latexes, acrylic acid is used from 0.1-5.0%, along with styrene and butadiene, to enhance binding to the paper and modify rheology, freeze-thaw stability and shear stability. In this context, U.S. Pat. Nos. 3,875,101 and 3,872,037 are incorporated by reference for their teachings regarding such latexes. Acrylate-based polymers also are used in many inks, particularly UV curable printing inks. For water treatment, acrylamide and/or hydroxy ethyl acrylate are commonly co-polymerized with acrylic acid to produce low molecular-weight linear polymers. In this context, U.S. Pat. Nos. 4,431,547 and 4,029,577 are incorporated by reference for their teachings of such polymers. Co-polymers of acrylic acid with maleic acid or itaconic acid are also produced for water-treatment applications, as described in U.S. Pat. No. 5,135,677, incorporated by reference for that teaching. Sodium acrylate (the sodium salt of glacial acrylic acid) can be co-polymerized with acrylamide (which may be derived from acrylic acid via amidation chemistry) to make an anionic co-polymer that is used as a flocculant in water treatment.

[0434] For thickening agents, a variety of co-monomers can be used, such as described in U.S. Pat. Nos. 4,268,641 and 3,915,921, incorporated by reference for description of these co-monomers. U.S. Pat. No. 5,135,677 describes a number of co-monomers that can be used with acrylic acid to produce water-soluble polymers, and is incorporated by reference for such description.

[0435] Also as noted, some conversions to downstream products may be made enzymatically. For example, 3-HP may be converted to 3-HP-CoA, which then may be converted into polymerized 3-HP with an enzyme having polyhydroxyacid synthase activity (EC 2.3.1.-). Also, 1,3-propanediol can be made using polypeptides having oxidoreductase activity or reductase activity (e.g., enzymes in the EC 1.1.1.-class of enzymes). Alternatively, when creating 1,3-propanediol from 3HP, a combination of (1) a polypeptide having aldehyde dehydrogenase activity (e.g., an enzyme from the 1.1.1.34 class) and (2) a polypeptide having alcohol dehydrogenase activity (e.g., an enzyme from the 1.1.1.32 class) can be used. Polypeptides having lipase activity may be used to form esters. Enzymatic reactions such as these may be conducted in vitro, such as using cell-free extracts, or in vivo.

[0436] Thus, various embodiments of the present invention, such as methods of making a chemical, include conversion steps to any such noted downstream products of microbially produced 3-HP, including but not limited to those chemicals described herein and in the incorporated references (the latter for jurisdictions allowing this). For example, one embodiment is making 3-HP molecules by the teachings herein and further converting the 3-HP molecules to polymerized-3-HP (poly-3-HP) or acrylic acid, and such as from acrylic acid then producing from the 3-HP molecules any one of polyacrylic acid (polymerized acrylic acid, in various forms), methyl acrylate, acrylamide, acrylonitrile, propiolactone, ethyl 3-HP, malonic acid, 1,3-propanediol, ethyl acrylate, n-butyl acrylate, hydroxypropyl acrylate, hydroxyethyl acrylate, isobutyl acrylate, 2-ethylhexyl acrylate, and acrylic acid or an acrylic acid ester to which an alkyl or aryl addition is made, and/or to which halogens, aromatic amines or amides, and aromatic hydrocarbons are added.

[0437] Also as noted, some conversions to downstream products may be made enzymatically. For example, 3-HP may be converted to 3-HP-CoA, which then may be converted into polymerized 3-HP with an enzyme having polyhydroxyacid synthase activity (EC 2.3.1.-). Also, 1,3-propanediol can be made using polypeptides having oxidoreductase activity or reductase activity (e.g., enzymes in the EC 1.1.1.-class of enzymes). Alternatively, when creating 1,3-propanediol from 3HP, a combination of (1) a polypeptide having aldehyde dehydrogenase activity (e.g., an enzyme from the 1.1.1.34 class) and (2) a polypeptide having alcohol dehydrogenase activity (e.g., an enzyme from the 1.1.1.32 class) can be used. Polypeptides having lipase activity may be used to form esters. Enzymatic reactions such as these may be conducted in vitro, such as using cell-free extracts, or in vivo.

[0438] Thus, various embodiments of the present invention, such as methods of making a chemical, include conversion steps to any such noted downstream products of microbially produced 3-HP, including but not limited to those chemicals described herein and in the incorporated references (the latter for jurisdictions allowing this). For example, one embodiment is making 3-HP molecules by the teachings herein and further converting the 3-HP molecules to polymerized-3-HP (poly-3-HP) or acrylic acid, and such as from acrylic acid then producing from the 3-HP molecules any one of polyacrylic acid (polymerized acrylic acid, in various forms), methyl acrylate, acrylamide, acrylonitrile, propiolactone, ethyl 3-HP, malonic acid, 1,3-propanediol, ethyl acrylate, n-butyl acrylate, hydroxypropyl acrylate, hydroxyethyl acrylate, isobutyl acrylate, 2-ethylhexyl acrylate, and acrylic acid or an acrylic acid ester to which an alkyl or aryl addition is made, and/or to which halogens, aromatic amines or amides, and aromatic hydrocarbons are added.

[0439] Reactions that form downstream compounds such as acrylates or acrylamides can be conducted in conjunction with use of suitable stabilizing agents or inhibiting agents reducing likelihood of polymer formation. See, for example, U.S. Patent Publication No. 2007/0219390 A1. Stabilizing agents and/or inhibiting agents include, but are not limited to, e.g., phenolic compounds (e.g., dimethoxyphenol (DMP) or alkylated phenolic compounds such as di-tert-butyl phenol), quinones (e.g., t-butyl hydroquinone or the monomethyl ether of hydroquinone (MEHQ)), and/or metallic copper or copper salts (e.g., copper sulfate, copper chloride, or copper acetate). Inhibitors and/or stabilizers can be used individually or in combinations as will be known by those of skill in the art. Also, in various embodiments, the one or more downstream compounds is/are recovered at a molar yield of up to about 100 percent, or a molar yield in the range from about 70 percent to about 90 percent, or a molar yield in the range from about 80 percent to about 100 percent, or a molar yield in the range from about 90 percent to about 100 percent. Such yields may be the result of single-pass (batch or continuous) or iterative separation and purification steps in a particular process.

[0440] Acrylic acid and other downstream products are useful as commodities in manufacturing, such as in the manufacture of consumer goods, including diapers, textiles, carpets, paint, adhesives, and acrylic glass.

[0441] XII. Production Pathways from Malonyl-CoA to Selected Chemical Products, Including Polyketides

[0442] In various embodiments the compositions, methods and systems of the present invention involve inclusion of a metabolic production pathway that converts malonyl-CoA to a chemical product of interest. Table 1B provides a listing of chemical products that may be made by microorganisms that comprise, and/or are modified to comprise, metabolic production pathways from malonyl-CoA to the selected chemical products. Information regarding the complete pathways is available from various resources, including www.metacyc.org. The chemical products listed in Table 1B, not considered to be limiting, includes a number of well-known polyketides. Table 1B also provides a listing of certain reactions for which malonyl-CoA is a reactant (substrate). The teachings of the present invention also may be used to increase rates and/or flux of such reactions.

TABLE 1B
Products and Pathway Reactions with Malonyl-CoA as a Reactant

```
  3-hydroxypropionic acid (3-HP, see specification for
  pathway description)
  Tetracycline, Erythromycin, Avermectin, macrolides,
  Vanomycin-group antibiotics, Type II polyketides
  (pathways available at www.metacyc.org)
(5R)-carbapenem biosynthesis:
  (S)-1-pyrroline-5-carboxylate + malonyl-CoA + H₂O + H⁺ =
  (2S, 5S)-carboxymethylproline + CO₂ + coenzyme A
6-methoxymellein biosynthesis:
  acetyl-CoA + 4 malonyl-CoA + NADPH + 5 H⁺ = 6-
  hydroxymellein + 4 CO₂ + NADP⁺ + 5 coenzyme A + H₂O,
  acetyl-CoA + 2 malonyl-CoA + H⁺ = triacetic acid
  lactone + 2 CO₂ + 3 coenzyme A
acridone alkaloid biosynthesis:
  N-methylanthraniloyl-CoA + 3 malonyl-CoA = 3 CO₂ +
  1,3-dihydroxy-N-methylacridone + 4 coenzyme A
actinorhodin biosynthesis:
  8 malonyl-CoA + a polyketide synthase containing an [acp]
  domain -> a 3,5,7,9,11,13,15-hepta-oxo-hexadecanoyl-
  [PKS-acp] + 8 CO₂ + 8 coenzyme A
aloesone biosynthesis I:
  acetyl-CoA + 6 malonyl-CoA + 6 H⁺ = aloesone + 7
  CO₂ + 7 coenzyme A + H₂O
aloesone biosynthesis II:
  7 malonyl-CoA + 4 H₂ = heptaketide pyrone + 7 CO₂ +
  7 coenzyme A + H₂O + 2 H⁺,
  6 malonyl-CoA + 3 H₂ = hexaketide pyrone + 6 CO₂ +
  6 coenzyme A + H₂O + H⁺
apigenin glycosides biosynthesis:
  7-O-β-D-glucosyl-apigenin + malonyl-CoA = apigenin
  7-O(6-malonyl-β-D-glucoside) + coenzyme A
aromatic polyketides biosynthesis:
  4-coumaroyl-CoA + 3 malonyl-CoA + 2 H⁺ =
  p-coumaroyltriacetic acid lactone + 3 CO₂ + 4
  coenzyme A,
  4-coumaroyl-CoA + 3 malonyl-CoA + 3 H⁺ = naringenin
  chalcone + 3 CO₂ + 4 coenzyme A
barbaloin biosynthesis:
  8 malonyl-CoA + 4 H₂ = octoketide 4b + 8 CO₂ + 8
  coenzyme A + H₂O + H⁺,
  8 malonyl-CoA + 4 H₂ = octoketide + 8 CO₂ + 8
  coenzyme A + H₂O + H⁺
biochanin A conjugates interconversion:
  biochanin A-7-O-glucoside + malonyl-CoA + ATP +
  H₂O = biochanin A-7-O-glucoside-6″-malonate +
  AMP + diphosphate + coenzyme A + 2 H⁺
cannabinoid biosynthesis:
  acetyl-CoA + 5 malonyl-CoA + 12 H⁺ = olivetolic
  acid + 5 CO₂ + 6 coenzyme A + 2 H₂O,
  hexanoyl-CoA + 3 malonyl-CoA + 2 H⁺ = olivetolic
  acid + 3 CO₂ + 4 coenzyme A
cohumulone biosynthesis:
  3 malonyl-CoA + isobutyryl-CoA + 3 H⁺ =
  phlorisobutyrophenone + 3 CO₂ + 4 coenzyme A
daidzein conjugates interconversion:
  daidzin + malonyl-CoA +ATP + H₂O =
  malonyldaidzin + AMP + diphosphate + coenzyme
  A + 2 H⁺
flavonoid biosynthesis:
  4-coumaroyl-CoA + 3 malonyl-CoA + NADPH +
  4 H⁺ = isoliquiritigenin + 3 CO₂ + NADP⁺ + 4
  coenzyme A + H₂O,
  4-coumaroyl-CoA + 3 malonyl-CoA + 3 H⁺ =
  naringenin chalcone + 3 CO₂ + 4 coenzyme A
formononetin conjugates interconversion:
  ononin + malonyl-CoA + ATP + H₂O = formononetin-
  7-O-glucoside-6″-malonate + AMP + diphosphate +
  coenzyme A + 2 H⁺
genistein conjugates interconversion:
  genistin + malonyl-CoA + ATP + H₂O =
  malonylgenistin + AMP + diphosphate + coenzyme
  A + 2 H⁺
glyoxylate assimilation:
  malonyl-CoA + NADPH + H⁺ = malonate
  semialdehyde + NADP⁺ + coenzyme A
humulone biosynthesis:
  isovaleryl-CoA + 3 malonyl-CoA + 3 H⁺ =
  phlorisovalerophenone + 3 CO₂ + 4 coenzyme A
hyperforin biosynthesis:
  3 malonyl-CoA + isobutyryl-CoA + 3 H⁺ =
  phlorisobutyrophenone + 3 CO₂ + 4 coenzyme A
maackiain conjugates interconversion:
  (-)-maackiain-3-O-glucoside + malonyl-CoA +
  ATP + H₂O = (-)-maackiain-3-O-glucoside-6″-
  malonate + AMP + diphosphate + coenzyme A + 2 H⁺
  malonate degradation I (biotin-independent):
  malonyl-CoA + a malonate decarboxylase (thiol form) =
  a malonate decarboxylase (malonyl form) + coenzyme A
medicarpin conjugates interconversion:
  (-)-medicarpin-3-O-glucoside + malonyl-CoA + ATP + H₂O =
  (-)-medicarpin-3-O-glucoside-6″-malonate + AMP +
  diphosphate + coenzyme A + 2 H⁺
mycolate biosynthesis:
  a lignoceroyl-[acp] + malonyl-CoA = a 3-oxo-cerotoyl-[acp] +
  CO₂ + coenzyme A,
  a stearoyl-[acp] + malonyl-CoA = a 3-oxo-arachidoyl-[acp] +
  CO₂ + coenzyme A,
  an arachidoyl-[acp] + malonyl-CoA = a 3-oxo-behenoyl-[acp] +
  CO₂ + coenzyme A,
  a behenoyl-[acp] + malonyl-CoA = a 3-oxo-lignoceroyl-[acp] +
  CO₂ + coenzyme A
olivetol biosynthesis:
  hexanoyl-CoA + 3 malonyl-CoA + H₂ = tetraketide pyrone + 3
  CO₂ + 4 coenzyme A,
  hexanoyl-CoA + 2 malonyl-CoA + H₂ = triketide pyrone + 2
  CO₂ + 3 coenzyme A + H⁺,
  hexanoyl-CoA + 3 malonyl-CoA + 2 H₂ = olivetol + 4
  CO₂ + 4 coenzyme A + H⁺
  pelargonidin conjugates biosynthesis:
  pelargonidin-3-O-β-D-glucoside + malonyl-CoA + H⁺ =
  pelargonidin-3-O-(6-O-malonyl-β-D-glucoside) + coenzyme A
pentaketide chromone biosynthesis:
  5 malonyl-CoA + 5 H⁺ = 5,7-dihydroxy-2-methylchromone +
  5 CO₂ + 5 coenzyme A + H₂O
pinobanksin biosynthesis:
  3 malonyl-CoA + (E)-cinnamoyl-CoA + 3 H⁺ = pinocembrin
  chalcone + 3 CO₂ + 4 coenzyme A
pinosylvin metabolism:
  3-phenylpropionyl-CoA + 3 malonyl-CoA + 3 H⁺ = 4 CO₂ +
  dihydropinosylvin + 4 coenzyme A,
  (E)-cinnamoyl-CoA + 3 malonyl-CoA + 3 H⁺ = 4 CO₂ +
  pinosylvin + 4 coenzyme A
plumbagin biosynthesis:
  acetyl-CoA + 5 malonyl-CoA + 3 H₂ + H⁺ =
  naphthylisoquinoline alkaloid precursor + 6 CO₂ + 6
  coenzyme A + 2 H₂O,
  acetyl-CoA + 5 malonyl-CoA + 2 H₂ = hexaketide
  pyrone + 5 CO₂ + 6 coenzyme A + H₂O
raspberry ketone biosynthesis:
  4-coumaroyl-CoA + malonyl-CoA + H₂O + H⁺ = 4-
  hydroxybenzalacetone + 2 CO₂ + 2 coenzyme A
resveratrol biosynthesis:
  4-coumaroyl-CoA + 3 malonyl-CoA + H₂O + 2 H⁺ = 3
  CO₂ + p-coumaroyltriacetate + 4 coenzyme A,
  4-coumaroyl-CoA + 2 malonyl-CoA + H⁺ = bis-,
  noryangonin + 2 CO₂ + 3 coenzyme A
  4-coumaroyl-CoA + 3 malonyl-CoA + 3 H⁺ =
  resveratrol + 4 CO₂ + 4 coenzyme A
rifamycin B biosynthesis:
  a 3-amino-8-[(2E)-2,4-dimethyl-5-oxohex-2-enoyl]-5,7-
  dihydroxy-6-methyl-1,4,5,6-tetrahydronaphthalene-1,4-
  dione -[PKS-acp] + 5 (S)-methylmalonyl-CoA + malonyl-
  CoA + 4 NADPH + 6 a polyketide synthase containing an
  [acp] domain = a 3-amino-5,7-dihydroxy-6-methyl-8-
  [(2E,13E,15E)-5,7,9,11-tetrahydroxy-2,4,6,8,10,12,16-
  heptamethyl-17-oxooctadeca-2,13,15-trienoyl]-1,4,5,6-
  tetrahydronaphthalene-1,4-dione-[PKS-acp] + 4 NADP⁺ +
  6 CO₂ + 6 a polyketide synthase containing an [acp]
  domain + 6 coenzyme A + 2 H₂O, a 1-(3-amino-
  5-hydroxyphenyl)ethan-1-one -[PKS-acp] + 2 (S)-
  methylmalonyl-CoA + malonyl-CoA + NADPH + 3
  a polyketide synthase containing an [acp] domain = a
  8-(3-amino-5-hydroxyphenyl)-8-hydroxy-3,7-
  dimethyloctane-2,4,6-trione -[PKS-acp] + NADP⁺ + 3
  CO₂ + 3 a polyketide synthase containing an [acp] domain +
  3 coenzyme A
salvianin biosynthesis:
  monodemalonylsalvianin + malonyl-CoA + H⁺ = salvianin +
  coenzyme A,
  bisdemalonylsalvianin + malonyl-CoA + H⁺ =
  monodemalonylsalvianin + coenzyme A
shisonin biosynthesis:
  shisonin + malonyl-CoA + H⁺ = malonylshisonin +
  coenzyme A
sorgoleone biosynthesis:
  9,12,15-cis-hexadecatrienoyl-CoA + 3 malonyl-CoA =
  5-pentadecatrienyl resorcinol + 4 CO₂ + 4 coenzyme A
stearate biosynthesis I (animals):
  palmitoyl-CoA + malonyl-CoA + H⁺ = 3-oxo-stearoyl-
  CoA + CO₂ + coenzyme A
stearate biosynthesis II (plants):
  a palmitoyl-[acp] + malonyl-CoA = a 3-oxo-
  stearoyl-[acp] + CO₂ + coenzyme A
superpathway of anthocyanin biosynthesis
(from cyanidin and cyanidin 3-O-glucoside):
  shisonin + malonyl-CoA + H⁺ = malonylshisonin +
  coenzyme A
ternatin C5 biosynthesis:
  delphinidin-3-O-β-D-glucoside + malonyl-CoA =
  delphinidin 3-O-(6″-O-malonyl)-β-glucoside +
  coenzyme A
tetrahydroxyxanthone biosynthesis
(from 3-hydroxybenzoate):
  3-hydroxybenzoyl-CoA + 3 malonyl-CoA + 3 H⁺ =
  3 CO₂ + 2,3′,4,6-tetrahydroxybenzophenone + 4
  coenzyme A
tetrahydroxyxanthone biosynthesis
(from benzoate):
  3 malonyl-CoA + benzoyl-CoA + 3 H⁺ = 2,4,6-
  trihydroxybenzophenone + 3 CO₂ + 4 coenzyme A
usnate biosynthesis:
  malonyl-CoA = methylphoracetophenone
xanthohumol biosynthesis:
  4-coumaroyl-CoA + 3 malonyl-CoA + 3 H⁺ =
  naringenin chalcone + 3 CO₂ + 4 coenzyme A
In Reactions not Assigned to Pathways:
  4-coumaroyl-CoA + 3 malonyl-CoA + 3 H⁺ = 4 CO₂ +
  3,4′,5-trihydroxystilbene + 4 coenzyme A,
  anthranilate + malonyl-CoA = N-Malonylanthranilate +
  coenzyme A,
  D-tryptophan + malonyl-CoA = N2-malonyl-D-
  tryptophan + coenzyme A + H⁺,
  a flavonol-3-O-β-D-glucoside +malonyl-CoA = a flavonol
  3-O-(6-O-malonyl-β-D-glucoside) + coenzyme A,
  3,4-dichloroaniline + malonyl-CoA = N-(3,4-
  dichlorophenyl)-malonamate + coenzyme A,
  S-adenosyl-L-methionine + 11 NADPH + 8 malonyl-
  CoA + acetyl-CoA + 18 H⁺ = S-adenosyl-L-homocysteine +
  11 NADP⁺ + 8 CO₂ + dihydromonacolin-L + 9 coenzyme A +
  6 H₂O,
  biochanin A-7-O-glucoside + malonyl-CoA = biochanin
  A-7-O-glucoside-6″-malonate + coenzyme A,
  acetyl-CoA + n malonyl-CoA + 2n NADPH + 2n H⁺ = a
  long-chain fatty acid + n CO₂ + 2n NADP⁺ + (n + 1)
  coenzyme A,
  isovaleryl-CoA + 2 malonyl-CoA + H⁺ = 6-isobutyl-4-
  hydroxy-2-pyrone + 2 CO₂ + 3 coenzyme A,
  isovaleryl-CoA + 3 malonyl-CoA + 2 H⁺ = 6-(4-methyl-2-
  oxopentyl)-4-hydroxy-2-pyrone + 3 CO₂ + 4 coenzyme A,
  stearoyl-CoA + malonyl-CoA + 2 NAD(P)H + 2 H⁺ =
  arachidoyl-CoA + CO₂ + 2 NAD(P)⁺ + coenzyme A + H₂O,
  acetyl-CoA + 3 malonyl-CoA + NADPH + 3 H⁺ = 6-
  methylsalicylate + 3 CO₂ + NADP⁺ + 4 coenzyme A + H₂O,
  malonyl-CoA + an anthocyanidin-3-O-β-D-glucoside = an
  anthocyanidin-3-O-(6-O-malonyl-(3-D-glucoside) +
  coenzyme A,
  7-O-β-D-glucosyl-7-hydroxyflavone + malonyl-CoA = 7-
  hydroxyflavone 7-O-(6-malonyl-β-D-glucoside) +
  coenzyme A,
  3 malonyl-CoA + benzoyl-CoA + 3 H⁺ = 3,5-
  dihydroxybiphenyl + 4 CO₂ + 4 coenzyme A,
  lauroyl-CoA + malonyl-CoA + H⁺ = 3-oxo-myristoyl-CoA +
  CO₂ + coenzyme A,
  myristoyl-CoA + malonyl-CoA + H⁺ = 3-oxo-palmitoyl-CoA +
  CO₂ + coenzyme A,
  5 malonyl-CoA = 1,3,6,8-naphthalenetetrol + CO₂ + 5
  coenzyme A,
  malonyl-CoA + phosphate + ADP = ATP + pimeloyl-
  CoA + bicarbonate + 2 H⁺
```

[0443] Further, the following Table, Table 1C, lists references, each respectively incorporated by reference herein for their teachings describing illustrative polyketide synthase (PKS) genes and corresponding enzymes that can be utilized in the construction of the genetically modified microorganisms and related methods and systems. Any of these may be employed in the embodiments of the present invention, such as in microorganisms that produce polyketides and also comprise modifications to decrease activity of fatty acid synthase enzymatic conversions. This listing is obtained from U.S. Patent Publication US2009/0111151 A1, incorporated by reference for its teachings of synthesis of various polyketides.

```
TABLE 1C
AVERMECTIN
  U.S. Pat. No. 5,252,474; U.S. Pat. No. 4,703,009; and
  EP Pub. No. 118,367 to Merck.
  MacNeil et al., 1993, Industrial Microorganisms: Basic and
  Applied Molecular Genetics, Baltz, Hegeman, & Skatrud, eds.
  (ASM), pp. 245-256, A Comparison of the Genes Encoding
  the Polyketide Synthases for Avermectin, Erythromycin, and
  Nemadectin.
  MacNeil et al., 1992, Gene 115: 119-125, Complex
  Organization of the Streptomyces avermtilis genes encoding the
  avermectin polyketide synthase.
  Ikeda and Omura, 1997, Chem. Res. 97: 2599-2609,
  Avermectin biosynthesis.
CANDICIDIN (FR008)
  Hu et al., 1994. Mol. Microbiol. 14: 163-172.
EPOTHILONE
  PCT Pub. No. 99/66028 to Novartis.
  PCT Pat. App. No. U599/27438 to Kosan.
ERYTHROMYCIN
  PCT Pub. No. 93/13663; U.S. Pat. No. 6,004,787; and
  U.S. Pat. No. 5,824,513 to Abbott.
  Donadio et al., 1991, Science 252:675-9.
  Cortes et al., 8 Nov. 1990, Nature 348:1768, An unusually
  large multifunctional polypeptide in the erythromycin
  producing polyketide synthase of Saccharopolyspora
  erythraea.
  Glycosylation Enzymes
  PCT Pub. No. 97/23630 and U.S. Pat. No. 5,998,194 to Abbott.
FK-506
  Motamedi et al., 1998, The biosynthetic gene cluster for the
  macrolactone ring of the immunosuppressant
  FK-506, Eur. J. biochem. 256: 528-534.
  Motamedi et al., 1997, Structural organization of a
  multifunctional polyketide synthase involved in the
  biosynthesis of the macrolide immunosuppressant
  FK-506, Eur. J. Biochem. 244: 74-80.
  Methyltransferase
  U.S. Pat. No. 5,264,355 and U.S. Pat. No. 5,622,866 to Merck.
  Motamedi et al., 1996, Characterization of methyltransferase and
  hydroxylase genes involved in the biosynthesis of the
  immunosuppressants FK-506 and FK-520, J.Bacteriol.
  178: 5243-5248.
FK-520
  PCT Pub. No. 00/20601 and U.S. patent application Ser. No.
  09/410,551, filed 1 Oct. 1999 to Kosan.
  Nielsen et al., 1991, Biochem. 30:5789-96.
LOVASTATIN
  U.S. Pat. No. 5,744,350 to Merck.
NARBOMYCIN
  U.S. patent application Ser. No. 09/434,288, filed
  5 Nov. 1999 to Kosan.
NEMADECTIN
  MacNeil et al., 1993, supra.
NIDDAMYCIN
  PCT Pub. No. 98/51695 to Abbott.
  Kakavas et al., 1997, Identification and characterization of the
  niddamycin polyketide synthase genes from Streptomyces
  caelestis, J. Bacteriol. 179: 7515-7522.
OLEANDOMYCIN
  Swan et al., 1994, Characterisation of a Streptomyces
  antibioticus gene encoding a type I polyketide synthase which
  has an unusual coding sequence, Mol. Gen. Genet. 242: 358-362.
  U.S. patent application Ser. No. 09/428,517, filed 28 Oct. 1999
  to Kosan.
  Olano et al., 1998, Analysis of a Streptomyces antibioticus c
  hromosomal region involved in oleandomycin biosynthesis,
  which encodes two glycosyltransferases responsible for
  glycosylation of the macrolactone ring, Mol. Gen. Genet.
  259(3): 299-308.
  PCT Pat. App. Pub. No. WO 99/05283 to Hoechst.
PICROMYCIN
  PCT Pub. No. 99/61599 to Kosan.
  PCT Pub. No. 00/00620 to the University of Minnesota.
  Xue et al., 1998, Hydroxylation of macrolactones YC-17 and
  narbomycin is mediated by the pikC-encoded cytochrome
  P450 in Streptomyces venezuelae, Chemistry & Biology 5(11):
  661-667.
  Xue et al., October 1998, A gene cluster for macrolide
  antibiotic biosynthesis in Streptomyces venezuelae:
  Architecture of metabolic diversity, Proc. Natl. Acad. Sci.
  USA 95:12111 12116.
PLATENOLIDE
  EP Pub. No. 791,656; and U.S. Pat. No. 5,945,320 to Lilly.
RAPAMYCIN
  Schwecke et al., August 1995, The biosynthetic gene cluster
  for the polyketide rapamycin, Proc. Natl. Acad. Sci. USA
  92:7839-7843.
  Aparicio et al., 1996, Organization of the biosynthetic gene
  cluster for rapamycin in Streptomyces hygroscopicus:
  analysis of the enzymatic domains in the modular
  polyketide synthase, Gene 169:9-16.
RIFAMYCIN
  PCT Pub. No. WO 98/07868 to Novartis.
  August et al., 13 Feb. 1998, Biosynthesis of the ansamycin
  antibiotic rifamycin: deductions from the molecular analysis
  of the rif biosynthetic gene cluster of Amycolatopsis
  mediterranei 5669, Chemistry & Biology, 5(2): 69-79.
SORANGIUM PKS
  U.S. patent application Ser. No. 09/144,085, filed
  31 Aug. 1998 to Kosan.
SORAPHEN
  U.S. Pat. No. 5,716,849 to Novartis.
  Schupp et al., 1995, J. Bacteriology 177: 3673-3679. A
  Sorangium cellulosum (Myxobacterium) Gene Cluster
  for the Biosynthesis of the Macrolide Antibiotic
  Soraphen A: Cloning, Characterization, and Homology
  to Polyketide Synthase Genes from Actinomycetes.
SPINOCYN
  PCT Pub. No. 99/46387 to DowElanco.
SPIRAMYCIN
  U.S. Pat. No. 5,098,837 to Lilly.
  Activator Gene
  U.S. Pat. No. 5,514,544 to Lilly.
TYLOSIN
  U.S. Pat. No. 5,876,991; U.S. Pat. No. 5,672,497; U.S.
  Pat. No. 5,149,638; EP Pub. No. 791,655; and EP Pub.
  No. 238,323 to Lilly.
  Kuhstoss et al., 1996, Gene 183:231-6., Production of a
  novel polyketide through the construction of a hybrid
  polyketide synthase.
```

[0444] Polypeptides, such as encoded by the various specified genes, may be NADH- or NADPH-dependent, and methods known in the art may be used to convert a particular enzyme to be either form. More particularly, as noted in WO 2002/042418, “any method can be used to convert a polypeptide that uses NADPH as a cofactor into a polypeptide that uses NADH as a cofactor such as those described by others (Eppink et al., J. Mol. Biol., 292 (1): 87-96 (1999), Hall and Tomsett, Microbiology, 146 (Pt 6): 1399-406 (2000), and Dohr et al., Proc. Natl. Acad. Sci., 98 (1): 81-86 (2001)).”

[0445] In various embodiments, bio-production of a selected chemical product may reach at least 1, at least 2, at least 5, at least 10, at least 20, at least 30, at least 40, and at least 50 g/liter titer, such as by using one of the methods disclosed herein.

[0446] As may be realized by appreciation of the advances disclosed herein as they relate to commercial fermentations of selected chemical products, embodiments of the present invention may be combined with other genetic modifications and/or method or system modulations so as to obtain a microorganism (and corresponding method) effective to produce at least 10, at least 20, at least 30, at least 40, at least 45, at least 50, at least 80, at least 100, or at least 120 grams of a chemical product per liter of final (e.g., spent) fermentation broth while achieving this with specific and/or volumetric productivity rates as disclosed herein.

[0447] In some embodiments a microbial chemical bio-production event (i.e., a fermentation event using a cultured population of a microorganism) proceeds using a genetically modified microorganism as described herein, wherein the specific productivity is between 0.01 and 0.60 grams of selected chemical product produced per gram of microorganism cell on a dry weight basis per hour (g chemical product/g DCW-hr). In various embodiments the specific productivity is greater than 0.01, greater than 0.05, greater than 0.10, greater than 0.15, greater than 0.20, greater than 0.25, greater than 0.30, greater than 0.35, greater than 0.40, greater than 0.45, or greater than 0.50 g chemical product/g DCW-hr. Specific productivity may be assessed over a 2, 4, 6, 8, 12 or 24 hour period in a particular microbial chemical production event. More particularly, the specific productivity for a chemical product is between 0.05 and 0.10, 0.10 and 0.15, 0.15 and 0.20, 0.20 and 0.25, 0.25 and 0.30, 0.30 and 0.35, 0.35 and 0.40, 0.40 and 0.45, or 0.45 and 0.50 g chemical product/g DCW-hr., 0.50 and 0.55, or 0.55 and 0.60 g chemical product/g DCW-hr. Various embodiments comprise culture systems demonstrating such productivity.

[0448] Also, in various embodiments of the present invention the volumetric productivity achieved may be 0.25 g polyketide (or other chemical product) per liter per hour (g (chemical product)/L-hr), may be greater than 0.25 g polyketide (or other chemical product)/L-hr, may be greater than 0.50 g polyketide (or other chemical product)/L-hr, may be greater than 1.0 g polyketide (or other chemical product)/L-hr, may be greater than 1.50 g polyketide (or other chemical product)/L-hr, may be greater than 2.0 g polyketide (or other chemical product)/L-hr, may be greater than 2.50 g polyketide (or other chemical product)/L-hr, may be greater than 3.0 g polyketide (or other chemical product)/L-hr, may be greater than 3.50 g polyketide (or other chemical product)/L-hr, may be greater than 4.0 g polyketide (or other chemical product)/L-hr, may be greater than 4.50 g polyketide (or other chemical product)/L-hr, may be greater than 5.0 g polyketide (or other chemical product)/L-hr, may be greater than 5.50 g polyketide (or other chemical product)/L-hr, may be greater than 6.0 g polyketide (or other chemical product)/L-hr, may be greater than 6.50 g polyketide (or other chemical product)/L-hr, may be greater than 7.0 g polyketide (or other chemical product)/L-hr, may be greater than 7.50 g polyketide (or other chemical product)/L-hr, may be greater than 8.0 g polyketide (or other chemical product)/L-hr, may be greater than 8.50 g polyketide (or other chemical product)/L-hr, may be greater than 9.0 g polyketide (or other chemical product)/L-hr, may be greater than 9.50 g polyketide (or other chemical product)/L-hr, or may be greater than 10.0 g polyketide (or other chemical product)/L-hr.

[0449] In some embodiments, specific productivity as measured over a 24-hour fermentation (culture) period may be greater than 0.01, 0.05, 0.10, 0.20, 0.5, 1.0, 2.0, 3.0, 4.0, 5.0, 6.0, 7.0, 8.0, 9.0, 10.0, 11.0 or 12.0 grams of chemical product per gram DCW of microorganisms (based on the final DCW at the end of the 24-hour period).

[0450] In various aspects and embodiments of the present invention, there is a resulting substantial increase in microorganism specific productivity that advances the fermentation art and commercial economic feasibility of microbial chemical production, such as of a polyketide (but not limited thereto).

[0451] Stated in another manner, in various embodiments the specific productivity exceeds (is at least) 0.01 g chemical product/g DCW-hr, exceeds (is at least) 0.05 g chemical product/g DCW-hr, exceeds (is at least) 0.10 g chemical product/g DCW-hr, exceeds (is at least) 0.15 g chemical product/g DCW-hr, exceeds (is at least) 0.20 g chemical product/g DCW-hr, exceeds (is at least) 0.25 g chemical product/g DCW-hr, exceeds (is at least) 0.30 g chemical product/g DCW-hr, exceeds (is at least) 0.35 g chemical product/g DCW-hr, exceeds (is at least) 0.40 g chemical product/g DCW-hr, exceeds (is at least) 0.45 g chemical product/g DCW-hr, exceeds (is at least) 0.50 g chemical product/g DCW-hr, exceeds (is at least) 0.60 g chemical product/g DCW-hr.

[0452] More generally, based on various combinations of the genetic modifications described herein, optionally in combination with supplementations described herein, specific productivity values for 3-HP, and for other chemical products described herein, may exceed 0.01 g chemical product/g DCW-hr, may exceed 0.05 g chemical product/g DCW-hr, may exceed 0.10 g chemical product/g DCW-hr, may exceed 0.15 g chemical product/g DCW-hr, may exceed 0.20 g chemical product/g DCW-hr, may exceed 0.25 g chemical product/g DCW-hr, may exceed 0.30 g chemical product/g DCW-hr, may exceed 0.35 g chemical product/g DCW-hr, may exceed 0.40 g chemical product/g DCW-hr, may exceed 0.45 g chemical product/g DCW-hr, and may exceed 0.50 g or 0.60 chemical product/g DCW-hr. Such specific productivity may be assessed over a 2, 4, 6, 8, 12 or 24 hour period in a particular microbial chemical production event.

[0453] The improvements achieved by embodiments of the present invention may be determined by percentage increase in specific productivity, or by percentage increase in volumetric productivity, compared with an appropriate control microorganism lacking the particular genetic modification combinations taught herein (with or without the supplements taught herein, added to a vessel comprising the microorganism population). For particular embodiments and groups thereof, such specific productivity and/or volumetric productivity improvements is/are at least 10, at least 20, at least 30, at least 40, at least 50, at least 100, at least 200, at least 300, at least 400, and at least 500 percent over the respective specific productivity and/or volumetric productivity of such appropriate control microorganism.

[0454] The specific methods and teachings of the specification, and/or cited references that are incorporated by reference, may be incorporated into the examples. Also, production of a chemical product may reach at least 1, at least 2, at least 5, at least 10, at least 20, at least 30, at least 40, and at least 50 g/liter titer in various embodiments.

[0455] The metrics may be applicable to any of the compositions, e.g., genetically modified microorganisms, methods, e.g., of producing chemical products, and systems, e.g., fermentation systems utilizing the genetically modified microorganisms and/or methods disclosed herein.

[0456] It is appreciated that iterative improvements using the strategies and methods provided herein, and based on the discoveries of the interrelationships of the pathways and pathway portions, may lead to even greater chemical product bio-production at the conclusion of a bio-production event.

[0457] XIII. Production of Chemical Products Other than 3-HP

[0458] As noted above and elsewhere herein, disclosures relating to 3-HP are not meant to be limiting, and it is appreciated that other chemical products may be produced from malonyl-CoA by using the present invention in microorganism host cells that comprise production pathways to such chemical products. The various teaching and combinations of genetic modifications disclosed herein may be, as appropriate, applied to the microorganisms, methods and systems that make 3-HP.

[0459] In various embodiments a microorganism cell comprises a metabolic pathway from malonyl-CoA to a selected chemical product, such as 3-HP as particularly described herein, and means for modulating conversion of malonyl-CoA to fatty acyl-ACP molecules (which thereafter may be converted to fatty acids) also are provided. Then, when the means for modulating modulate to decrease such conversion, a proportionally greater number of malonyl-CoA molecules are 1) produced and/or 2) converted via the metabolic pathway from malonyl-CoA to the selected chemical product.

[0460] A metabolic pathway from malonyl-CoA to 3-HP is disclosed herein and is not meant to be limiting. Other pathways to 3-HP are known in the art and may be utilized to produce 3-HP, including in combination with any combination of tolerance genetic modifications, as described herein. As shown in an example herein, addition of such genetic modifications related to the 3HPTGC unexpectedly increase specific productivity at 3-HP levels below toxic levels. Any production pathway that produces 3-HP may be combined with genetic modifications of the 3-HPTGC and achieve the specific and/or volumetric productivity metrics disclosed herein.

[0461] As to other metabolic pathways for chemical products other than 3-HP, various metabolic pathways for chemical products produced from malonyl-CoA are known to exist in particular organisms (E.g., see <<www.metacyc.org>>), and genetic recombination techniques may be used to provide into a selected microorganism cell the polynucleotides that encode various polypeptides that catalyze conversions along a respective metabolic pathway. Particular methods of genetic recombination are disclosed herein, and general references teaching such methods also are known to those skilled in the art and also referred to herein, so that one skilled in the art of genetic engineering reasonably may construct such microorganism cell based on these teachings. Alternatively a wild-type microorganism cell comprising such metabolic pathway may be utilized as a starting cell for use in the present invention, such as for genetic modification and/or the methods and systems disclosed and claimed herein.

[0462] XIV. Disclosed Embodiments are Non-Limiting

[0463] While various embodiments of the present invention have been shown and described herein, it is emphasized that such embodiments are provided by way of example only. Numerous variations, changes and substitutions may be made without departing from the invention herein in its various embodiments. Specifically, and for whatever reason, for any grouping of compounds, nucleic acid sequences, polypeptides including specific proteins including functional enzymes, metabolic pathway enzymes or intermediates, elements, or other compositions, or concentrations stated or otherwise presented herein in a list, table, or other grouping (such as metabolic pathway enzymes shown in a figure), unless clearly stated otherwise, it is intended that each such grouping provides the basis for and serves to identify various subset embodiments, the subset embodiments in their broadest scope comprising every subset of such grouping by exclusion of one or more members (or subsets) of the respective stated grouping. Moreover, when any range is described herein, unless clearly stated otherwise, that range includes all values therein and all sub-ranges therein.

[0464] Also, and more generally, in accordance with disclosures, discussions, examples and embodiments herein, there may be employed conventional molecular biology, cellular biology, microbiology, and recombinant DNA techniques within the skill of the art. Such techniques are explained fully in the literature. (See, e.g., Sambrook and Russell, “Molecular Cloning: A Laboratory Manual,” Third Edition 2001 (volumes 1-3), Cold Spring Harbor Laboratory Press, Cold Spring Harbor, N.Y.; Animal Cell Culture, R. I. Freshney, ed., 1986.) These published resources are incorporated by reference herein for their respective teachings of standard laboratory methods found therein. Such incorporation, at a minimum, is for the specific teaching and/or other purpose that may be noted when citing the reference herein. If a specific teaching and/or other purpose is not so noted, then the published resource is specifically incorporated for the teaching(s) indicated by one or more of the title, abstract, and/or summary of the reference. If no such specifically identified teaching and/or other purpose may be so relevant, then the published resource is incorporated in order to more fully describe the state of the art to which the present invention pertains, and/or to provide such teachings as are generally known to those skilled in the art, as may be applicable. However, it is specifically stated that a citation of a published resource herein shall not be construed as an admission that such is prior art to the present invention. Also, in the event that one or more of the incorporated published resources differs from or contradicts this application, including but not limited to defined terms, term usage, described techniques, or the like, this application controls. Subject matter in the Examples is incorporated into this section to the extent not already present.

[0465] While various embodiments of the present invention have been shown and described herein, it is emphasized that such embodiments are provided by way of example only. Numerous variations, changes and substitutions may be made without departing from the invention herein in its various embodiments. Specifically, and for whatever reason, for any grouping of compounds, nucleic acid sequences, polypeptides including specific proteins including functional enzymes, metabolic pathway enzymes or intermediates, elements, or other compositions, or concentrations stated or otherwise presented herein in a list, table, or other grouping (such as metabolic pathway enzymes shown in a figure), unless clearly stated otherwise, it is intended that each such grouping provides the basis for and serves to identify various subset embodiments, the subset embodiments in their broadest scope comprising every subset of such grouping by exclusion of one or more members (or subsets) of the respective stated grouping. For example, without being limiting, the 3HPTGC described herein, may comprise all members except arginine decarboxylase, or other such subsets excluding arginine decarboxylase. Moreover, when any range is described herein, unless clearly stated otherwise, that range includes all values therein and all sub-ranges therein. Accordingly, it is intended that the invention be limited only by the spirit and scope of appended claims, and of later claims, and of either such claims as they may be amended during prosecution.

### EXAMPLES

[0466] The examples herein provide some examples, not meant to be limiting, of combinations of genetic modifications and supplement additions. The following examples include both actual examples and prophetic examples.

[0467] Unless indicated otherwise, temperature is in degrees Celsius and pressure is at or near atmospheric pressure at approximately 5,340 feet (1,628 meters) above sea level. It is noted that work done at external analytical and synthetic facilities is not conducted at or near atmospheric pressure at approximately 5,340 feet (1,628 meters) above sea level. Examples 11A and 11C were conducted at a contract laboratory, not at the indicated elevation. All reagents, unless otherwise indicated, are obtained commercially. Species and other phylogenic identifications are according to the classification known to a person skilled in the art of microbiology.

[0468] The names and city addresses of major suppliers are provided herein. In addition, as to Qiagen products, the DNeasy® Blood and Tissue Kit, Cat. No. 69506, is used in the methods for genomic DNA preparation; the QIAprep® Spin (“mini prep”), Cat. No. 27106, is used for plasmid DNA purification, and the QIAquick® Gel Extraction Kit, Cat. No. 28706, is used for gel extractions as described herein.

### Example 1

### Construction of Plasmids Expressing Malonyl-CoA Reductase (Mcr)

[0469] The nucleotide sequence for the malonyl-CoA reductase gene from Chloroflexus aurantiacus was codon-optimized for E. coli according to a service from DNA2.0 (Menlo Park, Calif. USA), a commercial DNA gene synthesis provider. This gene sequence (SEQ ID NO:803) incorporated an EcoRI restriction site before the start codon and was followed by a HindIII restriction site. In addition, a ribosomal binding site was placed in front of the start codon. This gene construct was synthesized by DNA2.0 and provided in a pJ206 vector backbone (SEQ ID NO:804). Plasmid DNA pJ206 containing the synthesized mcr gene was subjected to enzymatic restriction digestion with the enzymes EcoRI and HindIII obtained from New England BioLabs (Ipswich, Mass. USA) according to manufacturer's instructions. The digestion mixture was separated by agarose gel electrophoresis and the appropriate DNA fragment recovered as described in the Common Methods Section. An E. coli cloning strain bearing pKK223-aroH was obtained as a kind gift from the laboratory of Prof. Ryan T. Gill from the University of Colorado at Boulder. Cultures of this strain bearing the plasmid were grown and plasmid DNA prepared as described in the Common Methods Section. Plasmid DNA was digested with the restriction endonucleases EcoRI and HindIII obtained from New England Biolabs (Ipswich, Mass. USA) according to manufacturer's instructions. This digestion served to separate the aroH reading frame from the pKK223 backbone. The digestion mixture was separated by agarose gel electrophoresis, and the agarose gel slice containing the DNA piece corresponding to the backbone of the pKK223 plasmid was recovered as described in the Common Methods Section.

[0470] Purified DNA fragments corresponding to the mcr gene and pK223 vector backbone were ligated and the ligation product was transformed and electroporated according to manufacturer's instructions. The sequence of the resulting vector termed pKK223-mcr was confirmed by routine sequencing performed by a commercial provider (SEQ ID NO:003). pKK223-mcr confers resistance to ampicillin and contains the mcr gene of C. aurantiacus under control of a P_{tac} promoter inducible in E. coli hosts by IPTG.

[0471] To express the mcr gene under the regulation of other promoters besides the P_{tac} on pKK223, the synthetic mcr gene was transferred to other plasmids. Plasmid pTrc-P_{trc}-mcr was based on pTrcHisA (Invitrogen, Carlsbad, Calif.; Catalog Number V360-20) and the expression of mcr is directed by the P_{trc} IPTG-inducible promoter. The inducer-independent P_{talA} promoter is based on sequences upstream of the E. coli talA gene. The nucleotide sequence of this promoter, placed immediately upstream of the initiator ATG codon of the synthetic mcr gene, is listed as SEQ ID NO:805.

[0472] The P_{talA}:mcr construct was incorporated by PCRn into a pSC-B vector (Stratagene Corporation, La Jolla, Calif., USA), which was propagated in an E. coli stock, the plasmid DNA purified according to methods described elsewhere herein. The P_{talA}:mcr region in pSC-B-P_{talA}:mcr was transferred to a plasmid vector, pSMART-HCamp (Lucigen Corporation, Middleton, Wis., catalog number 40041-2, GenBank AF399742) by PCRn using vector primers, M13F and M13R. The fragment generated by PCRn was cloned into pSMART-HCamp according to the manufacturer's protocol resulting in plasmid pSMART(HC)Amp-P_{talA}-mcr (SEQ ID NO:806) in which mcr expression does not require induction with IPTG.

### Example 2

### Construction of a Plasmid Expressing Transhydrogenase (pntAB)

[0473] A fusion of the inducer-independent E. coli promoter derived from the tpiA gene (P_{tpiA}) and the pyridine nucleotide transhydrogenase genes, pntAB, (SEQ ID NO:779 and SEQ ID NO:781) was created by amplifying the tpiA promoter region and pntAB region from genomic E. coli K12 DNA by polymerase chain reactions. For the pntAB genes, the region was amplified using the pntAB forward primer GGGAACCATGGCAATTGGCATACCAAG (SEQ ID NO:807, noting that all primers disclosed herein are artificial sequences) containing a NcoI site that incorporates the initiator Met for the protein sequence of pntA and the pntAB reverse primer GGGTTACAGAGCTTTCAGGATTGCATCC (SEQ ID NO:808). Likewise, the P_{tpiA} region was amplified using the forward primer GGGAACGGCGGGGAAAAACAAACGTT (SEQ ID NO:809) and the reverse primer GGTCCATGGTAATTCTCCACGCTTATAAGC (SEQ ID NO:810) containing a NcoI restriction site. Polymerase chain reaction products were purified using a PCRn purification kit from Qiagen Corporation (Valencia, Calif., USA) using the manufacturer's instructions. Following purification, the products were subjected to enzymatic restriction digestion with the enzyme NcoI. Restriction enzymes were obtained from New England BioLabs (Ipswich, Mass. USA), and used according to manufacturer's instructions. The digestion mixtures were separated by agarose gel electrophoresis, and visualized under UV transillumination as described in the Common Methods Section. Agarose gel slices containing the DNA fragment corresponding to the amplified pntAB gene product and the P_{tpiA} product were excised from the gel and the DNA recovered with a gel extraction kit from Qiagen used according to manufacturer's instructions. The recovered products were ligated together with T4 DNA ligase (New England BioLabs, Ipswich, Mass. USA) according to manufacturer's instructions.

[0474] Because the ligation reaction can result in several different products, the desired product corresponding to the P_{tpiA} fragment ligated to the pntAB genes was amplified by polymerase chain reaction and isolated by a second gel purification. For this polymerase chain reaction, the forward primer was GGGAACGGCGGGGAAAAACAAACGTT (SEQ ID NO:809), and the reverse primer was GGGTTACAGAGCTTTCAGGATTGCATCC (SEQ ID NO:808), and the ligation mixture was used as template. The digestion mixtures were separated by agarose gel electrophoresis, and visualized under UV transillumination as described the Common Methods Section. Agarose gel slices containing the DNA piece corresponding to the amplified P_{tpiA}-pntAB fusion was cut from the gel and the DNA recovered with a standard gel extraction protocol and components from Qiagen according to manufacturer's instructions. This extracted DNA was inserted into a pSC-B vector using the Blunt PCRn Cloning kit obtained from Stratagene Corporation (La Jolla, Calif., USA) using the manufacturer's instructions. Colonies were screened by colony polymerase chain reactions. Plasmid DNA from colonies showing inserts of correct size were cultured and miniprepped using a standard miniprep protocol and components from Qiagen according to the manufacturer's instruction. Isolated plasmids were checked by restriction digests and confirmed by sequencing. The sequenced-verified isolated plasmids produced with this procedure were designated pSC-B-P_{tpiA}:pntAB.

[0475] The P_{tpiA}:pntAB region in pSC-B-P_{tpiA}:pntAB was transferred to a pBT-3 vector (SEQ ID NO:811) which provides a broad host range origin of replication and a chloramphenicol selection marker. To achieve this construct, a fragment from pBT-3 vector was produced by polymerase chain amplification using the forward primer AACGAATTCAAGCTTGATATC (SEQ ID NO:812), and the reverse primer GAATTCGTTGACGAATTCTCT (SEQ ID NO:813), using pBT-3 as template. The amplified product was subjected to treatment with DpnI to restrict the methylated template DNA, and the mixture was separated by agarose gel electrophoresis, and visualized under UV transillumination as described in the Common Methods Section. The agarose gel slice containing the DNA fragment corresponding to amplified pBT-3 vector product was cut from the gel and the DNA recovered with a standard gel extraction protocol and components from Qiagen according to manufacturer's instructions. The P_{tpiA}:pntAB insert in pSC-B-P_{tpiA}:pntAB was amplified using a polymerase chain reaction with the forward primer GGAAACAGCTATGACCATGATTAC (SEQ ID NO:814) and the reverse primer TTGTAAAACGACGGCCAGTGAGCGCG (SEQ ID NO:815. Both primers were 5′ phosphorylated.

[0476] The PCRn product was separated by agarose gel electrophoresis, and visualized under UV transillumination as described in the Common Methods Section. Agarose gel slices containing the DNA fragment corresponding to the amplified P_{tpiA}:pntAB insert was excised from the gel and the DNA recovered with a standard gel extraction protocol and components from Qiagen according to manufacturer's instructions. This insert DNA was ligated into the pBT-3 vector prepared as described herein with T4 DNA ligase obtained from New England Biolabs (Bedford, Mass., USA), following the manufacturer's instructions. Ligation mixtures were transformed into E. coli 100 cells obtained from Lucigen Corp according to the manufacturer's instructions. Colonies were screened by colony polymerase chain reactions. Plasmid DNA from colonies showing inserts of correct size were cultured and purified using a standard miniprep protocol and components from Qiagen according to the manufacturer's instruction. Isolated plasmids were checked by restriction digests and confirmed by sequencing. The sequenced-verified isolated plasmid produced with this procedure was designated pBT-3-P_{tpiA}:pntAB (SEQ ID NO:816).

### Example 3

### Construction of a Plasmid Expressing Acetyl-CoA Carboxylase (accABCD)

[0477] A plasmid carrying two operons able to express the components the acetyl-CoA carboxyltransferase complex from E. coli was constructed by DNA2.0 (Menlo Park, Calif. USA), a commercial DNA gene synthesis provider. This construct incorporated the DNA sequences of the accA and accD genes under control of an inducer-independent promoter derived from the E. coli tpiA gene, and the DNA sequences of. the accB and accC genes under control of an inducer-independent promoter derived from the E. coli rpiA genes. Each coding sequence was preceded by a ribosome-binding sequence. The designed operons were provided in a pJ251 vector backbone and was designated pJ251:26385 (SEQ ID NO:817).

[0478] The tpiA promoter of the pJ251:26385 plasmid was altered to provide better expression. This modification was incorporated by amplifying the pJ251:26385 plasmid with the forward primer GCGGGGCAGGAGGAAAAACATG (SEQ ID NO:818) and the reverse primer GCTTATAAGCGAATAAAGGAAGATGGCCGCCCCGCAGGGCAG (SEQ ID NO:819). Each of these primers were synthesized with a 5′ phosphorylation modification. The resulting PCRn product was separated by agarose gel electrophoresis, and the appropriate DNA fragment recovered as described in the Common Methods Section. The recovered product was self-ligated with T4 DNA ligase obtained from New England BioLabs (Ipswich, Mass. USA) and digested with DpnI according to manufacturer's instructions. Plasmid DNA from colonies showing inserts of correct size were cultured and purified using a standard miniprep protocol and components from Qiagen according to the manufacturer's instruction. Isolated plasmids were checked by restrictions digests and confirmed by sequencing. The sequenced-verified isolated plasmids produced with this procedure were designated pJ251(26385)-P_{tpiA}:accAD-P_{tpiA}:accBC (SEQ ID NO:820).

### Example 4

### Construction of Plasmids Expressing Genes Related to the 3-HP Toleragenic Complex

[0479] The examples of plasmid construction for plasmids that comprise genes expressing polypeptides exhibiting enzymatic activity of the 3HPTGC are incorporated from WO 2010/011874, published Jan. 28, 2010. Although many single or combination of genetic modifications of the 3HPTGC may be provided in a particular embodiment so as to increase 3-HP tolerance, only a few are provided in the examples. This is not meant to be limiting.

### Example 5

### Construction of Specific Strains that Produce 3-Hydroxypropionic Acid

[0480] According to the respective combinations indicated in the following table, the plasmids described herein were introduced into the respective base strains. All plasmids were introduced at the same time via electroporation using standard methods. Transformed cells were grown on the appropriate media with antibiotic supplementation and colonies were selected based on their appropriate growth on the selective media. The mcr expression plasmid pKK223-mcr was transformed into E. coli DF40 (Hfr, garB10, fhuA22, ompF627, fadL701, relA1, pitA10, spoT1, rrnB-2, pgi-2, mcrB1, creC527) or E. coli JP1111 (Hfr, galE45(GalS), LAM-, fabI392 (ts, temperature-sensitive), relA1, spoT1, thi-1) as described in the Common Methods Section. As is known in the art, the strains DF40 and JP1111 are generally available E. coli strains, available from sources including the Yale Coli Genetic Stock Collection (New Haven, Conn. USA). Strains carrying multiple compatible plasmids were constructed from these mcr transformants by preparing cells competent for transformation by electroporation as described in the Common Methods Section and transforming with the additional plasmids. Transformants were subsequently selected for on media containing the appropriate combination of antibiotics.

TABLE 9
Strain names and characteristics

| Strain name | Host | Plasmids |
|---|---|---|
| KX3_0001 | DF40 | pKK223-mcr |
| JX3_0077 | JP1111 | pKK223-mcr |
| JX3_0087 | JP1111 | pkk223-mcr + |
| | | pBT-3-PtpiA:pntAB |
| JX3_0097 | JP1111 | pkk223-mcr + |
| | | pJ251(26385)PtpiA:accAD-PrpiA:accBC |
| JX3_0098 | JP1111 | pKK223-mcr +30 |
| | | pJ251(26385)PtpiA:accAD-PrpiA:accBC + |
| | | pBT-3-PtpiA:pntAB |

### Example 6

### Production of 3-Hydroxypropionic Acid

[0481] 3-HP production by KX3_{—}0001 was demonstrated at 100-mL scale in fed-batch (rich) or AM2 (minimal salts) media. Cultures were started from freezer stocks by standard practice (Sambrook and Russell, 2001) into 50 mL of LB media plus 100 μg/mL ampicillin and grown to stationary phase overnight at 37° C. with rotation at 225 rpm. Five ml of this culture were transferred to 100 ml of fed-batch or AM2 media plus 40 g/L glucose, 100 μg/ml ampicillin, 1 mM IPTG in triplicate 250-ml baffled flasks, and incubated at 37° C., 225 rpm. To monitor cell growth and 3-HP production by these cultures, samples (2 ml) were withdrawn at designated time points for optical density measurements at 600 nm (OD₆₀₀, 1 cm pathlength) and pelleted by centrifugation at 12,000 rpm for 5 min and the supernatant collected for analysis of 3-HP production as described under “Analysis of cultures for 3-HP production” in the Common Methods section. Dry cell weight (DCW) is calculated as 0.33 times the measured OD₆₀₀ value, based on baseline DCW to OD₆₀₀ determinations. All data are the average of triplicate cultures. For comparison purposes, the specific productivity is calculated from the averaged data at the 24-h time point and expressed as g 3-HP produced per gDCW. Production of 3-HP by strain KX3_{—}0001 in fed-batch medium is shown in the following table. Under these conditions, the specific productivity after 24 h is 0.0041 g 3-HP per gDCW.

TABLE 10
Production of 3-HP by KX3_0001 in fed-batch medium

| Time (hr) | 3HP (g/L) | OD₆₀₀ |
|---|---|---|
| 0 | 0.002 | 0.118 |
| 3 | 0.002 | 0.665 |
| 4 | 0.005 | 1.44 |
| 6 | 0.008 | 2.75 |
| 8 | 0.009 | 3.35 |
| 24 | 0.008 | 5.87 |

### Example 7

### Effect on 3-HP Production of Increased Malonyl-CoA Precursor Pools by Inhibition of Fatty Acid Synthesis

[0482] As described herein, certain chemicals are known to inhibit various enzymes of the fatty acid synthase system, some of which are used as antibiotics given the role of fatty acid synthesis in membrane maintenance and growth, and microorganism growth. Among these inhibitors is cerulenin, which inhibits the KASI β-ketoacyl-ACP synthase (e.g., fabB in E. coli). To further evaluate approaches to modulate and shift malonyl-CoA utilization in microorganisms that comprise production pathways to a selected chemical product, here 3-HP, wherein malonyl-CoA is a substrate in that pathway, addition of cerulenin during a culture was evaluated.

[0483] Pathways downstream of malonyl-CoA are limited to fatty acid biosynthesis and 3HP production (when a pathway to the latter via malonyl-CoA exists or is provided in a cell). This experiment is designed to determine how to control the use of malonyl-CoA pools in 3HP production strains and further improve the rate of 3HP production. It is hypothesized that by inhibiting fatty acid biosynthesis and regulating malonyl-CoA pools, flux through the pathway will be shifted toward 3HP production. A diagram of the possible carbon flow through malonyl-CoA in current 3HP production pathways is shown in FIG. 9. A representative inhibitor has been selected that both interrupt fatty acid elongation and disrupt a futile cycle that recaptures the malonate moiety back to the acetyl-CoA pool.

[0484] Production by strain KX3_{—}0001 in fed-batch medium in the presence of 10 μg/ml cerulenin is shown in Table 11. In the presence of the inhibitor, internal pools of the malonyl-CoA precursor are proposed to increase thus leading to increased production of 3-HP. As may be seen by comparison to the results without cerulenin (Table 5), substantially more 3-HP is produced at every time point, and the specific productivity at 24 h is 0.128 g 3-HP per gDCW, a 31-fold increase relative to the results without cerulenin.

TABLE 11
Production of 3-HP by KX3_0001 in fed-batch
medium and the presence of 10 μg/ml cerulenin

| 3HP (g/L) | OD₆₀₀ |
|---|---|
| 0.002 | 0.118 |
| 0.002 | 0.724 |
| 0.020 | 1.59 |
| 0.060 | 2.80 |
| 0.090 | 3.45 |
| 0.200 | 4.73 |

### Example 8

### Effect on 3-HP Production of Increased Malonyl-CoA Precursor Pools Using Temperature-Sensitive Fatty Acid Synthesis Mutants

[0485] An alternative approach to increasing internal malonyl-CoA pools is to use genetic mutations rather than chemical inhibitors. While inactivating mutations in the genes encoding fatty acid synthesis functions are usually lethal and thus not obtainable, conditional mutants, such as temperature-sensitive mutants, have been described (de Mendoza, D., and Cronan, J. E., Jr. (1983) Trends Biochem. Sci., 8, 49-52). For example, a temperature-sensitive mutation in the fabI gene, encoding enoyl-ACP reductase, of strain JP1111 (genotype fabI392(ts)) has relatively normal activity at reduced temperature, such as 30 C, and becomes non-permissive, likely through denaturation and inactivation, at elevated temperature, such that when cultured at 37 to 42 C a microorganism only comprising this temperature-sensitive mutant as its enoyl-ACP reductase will produce substantially less fatty acids and phospholipids. This leads to decreased or no growth. However, it was hypothesized that when such mutant is provided in a genetically modified microorganism that also comprises a production pathway, such as to 3-HP, from malonyl-CoA, effective culture methods involving elevating culture temperature can result in increased 3-HP specific productivity.

[0486] Production of 3-HP by strain JX3_{—}0077 in fed-batch medium at a constant temperature of 30° C. and by a culture subjected to a temperature shift from 30° C. to 42° C. is shown in Table 12. The temperature shift is designed to inactivate the enoyl-ACP reductase, hence eliminating the accumulation of fatty acid which in turn increases the internal malonyl-CoA pool. Substantially more 3-HP is produced at every time point, and the specific productivity at 24 h by the temperature-shifted culture is 1.15 g 3-HP per gDCW, a greater than 100-fold increase over the specific productivity of 0.011 g 3-HP per gDCW by the culture maintained constantly at 30° C. This increased productivity of 3-HP by the culture in which the enoyl-ACP reductase is inactivated by elevated temperature supports the view that shifting of malonyl-CoA utilization leads to increased 3-HP production.

TABLE 12
Production of 3-HP by JX3_0077 in fed-batch medium

| Constant 30° C. | | | Shifted to 42° C. | |
|---|---|---|---|---|
| Time (hr) | 3HP (g/L) | OD₆₀₀ | 3HP (g/L) | OD₆₀₀ |
| 0 | 0 | 0.065 | 0.0007 | 0.068 |
| 3 | 0.003 | 0.273 | 0.004 | 0.25 |
| 4 | 0.010 | 0.409 | 0.037 | 0.79 |
| 6 | 0.030 | 1.09 | 0.096 | 0.91 |
| 8 | 0.016 | 1.81 | 0.193 | 0.81 |
| 24 | 0.014 | 3.8 | 0.331 | 0.87 |

[0487] Table 13 shows the 3-HP production by strain JX3_{—}0087 which carried a plasmid overexpressing the transhydrogenase gene in addition to a plasmid carrying the mcr gene. In the culture maintained at a constant temperature of 30° C., a specific productivity of 0.085 g 3-HP per gDCW in 24 h was attained. This is significantly higher than the specific productivity of JX3_{—}0077 which does not carry the overexpressed transhydrogenase gene (Table 7). The specific productivity of the temperature-shifted culture of JX3_{—}0087 was 1.68 g 3-HP per gDCW, a 20-fold increase over the specific productivity of the culture maintained constantly at 30° C. in which the enoyl-ACP reductase was not inactivated.

TABLE 13
Production of 3-HP by JX3_0087 in fed-batch medium

| | Constant 30° C. | | Shifted to 42° C. | |
|---|---|---|---|---|
| Time (hr) | 3HP (g/L) | OD₆₀₀ | 3HP (g/L) | OD₆₀₀ |
| 0 | 0 | 0.008 | 0 | 0.004 |
| 3 | 0.0007 | 0.008 | 0.0007 | 0.011 |
| 4 | 0 | 0.04 | 0.002 | 0.063 |
| 6 | 0.0007 | 0.05 | 0.009 | 0.193 |
| 8 | 0.003 | 0.157 | 0.050 | 0.257 |
| 24 | 0.003 | 0.107 | 0.455 | 0.820 |

[0488] Table 14 shows the 3-HP production by strain JX3_{—}0097 which carried a plasmid overexpressing genes encoding the acetyl-CoA carboxylase complex in addition to a plasmid carrying the mcr gene. In the culture maintained at a constant temperature of 30° C., a specific productivity of 0.0068 g 3-HP per gDCW in 24 h was attained. This specific productivity is similar to that attained by strain JX3_{—}0077 in which acetyl-CoA carboxylase is not overexpressed. The specific productivity of the temperature-shifted culture of JX3_{—}0097 was 0.29 g 3-HP per gDCW, a 42-fold increase over the specific productivity of the culture maintained constantly at 30° C. in which the enoyl-ACP reductase was not inactivated

TABLE 14
Production of 3-HP by JX3_0097 in fed-batch medium

| Constant 30° C.* | | | Shifted to 42° C.* | |
|---|---|---|---|---|
| Time (hr) | 3HP (g/L) | OD₆₀₀ | 3HP (g/L) | OD₆₀₀ |
| 0 | | 0.016 | 0 | 0.014 |
| 4 | 0.004 | 0.3 | 0.004 | 0.31 |
| 5 | | 0.36 | 0.006 | 0.59 |
| 6 | | 0.65 | 0.062 | 1.51 |
| 8 | 0.006 | 1.46 | 0.178 | 1.91 |
| 24 | 0.006 | 2.66 | 0.176 | 1.87 |

[0489] Fed-batch medium, a rich medium, may contain components that serve as fatty acid precursors and thus may reduce the demand for malonyl-CoA. Thus the production of 3-HP by the strains derived from JP1111 in AM2, a minimal medium was verified. As shown in Table 15, 3-HP was produced by JX3_{—}0077 in AM2 medium. A specific productivity of 0.024 g 3-HP per gDCW in 24 h was obtained by the culture maintained constantly at 30° C., approximately twice the value obtained in fed-batch medium. The temperature-shifted culture attained a specific productivity of 1.04 g 3-HP per gDCW over 24 h, a 44-fold increase compared to the specific productivity of the culture maintained constantly at 30° C., again indicating that conditional inactivation of the enoyl-ACP reductase increased the internal malonyl-CoA pool and hence increased the 3-HP production, as envisioned by the inventors.

TABLE 15
Production of 3-HP by JX3_0077 in AM2 medium

| Constant 30° C. | | | Shifted to 42° C. | |
|---|---|---|---|---|
| Time (hr) | 3HP (g/L) | OD₆₀₀ | 3HP (g/L) | OD₆₀₀ |
| 0 | 0 | 0.066 | 0 | 0.063 |
| 4 | 0.002 | 0.360 | 0.002 | 0.40 |
| 5 | 0.004 | 0.253 | 0.015 | 0.39 |
| 6 | 0.004 | 0.413 | 0.1 | 0.68 |
| 8 | 0.005 | 0.476 | 0.2 | 0.71 |
| 24 | 0.008 | 1.03 | 0.25 | 0.73 |

[0490] Production of 3-HP in AM2 medium by strain JX3_{—}0087, which carried a plasmid overexpressing the transhydrogenase gene in addition to a plasmid carrying the mcr gene, is shown. In the JX3_{—}0087 culture maintained at a constant temperature of 30° C., a specific productivity of 0.018 g 3-HP per gDCW in 24 h was attained. In contrast to results obtained in fed-batch medium, this value is not higher than the specific productivity obtained in AM2 with strain JX3_{—}0077 which does not carry the overexpressed transhydrogenase gene (Table 15). The specific productivity of the temperature-shifted culture of JX3_{—}0087 was 0.50 g 3-HP per gDCW, a 27-fold increase over the specific productivity of the culture maintained constantly at 30° C. in which the enoyl-ACP reductase was not inactivated.

TABLE 16
Production of 3-HP by JX3_0087 in AM2

| Constant 30° C. | | | Shifted to 42° C. | |
|---|---|---|---|---|
| Time (hr) | 3HP (g/L) | OD₆₀₀ | 3HP (g/L) | OD₆₀₀ |
| 0 | 0 | 0.08 | 0 | 0.086 |
| 4 | 0.002 | 0.363 | 0.002 | 0.380 |
| 5 | 0.002 | 0.273 | 0.011 | 0.360 |
| 6 | 0.003 | 0.297 | 0.050 | 0.520 |
| 8 | 0.005 | 0.467 | 0.100 | 0.607 |
| 24 | 0.006 | 1.0 | 0.112 | 0.683 |

[0491] Table 17 shows the 3-HP production in AM2 medium by strain JX3_{—}0097 which carried a plasmid overexpressing genes encoding the acetyl-CoA carboxylase complex in addition to a plasmid carrying the mcr gene. In the culture maintained at a constant temperature of 30° C., a specific productivity of 0.021 g 3-HP per gDCW in 24 h was attained. This specific productivity is similar to that attained by strain JX3_{—}0077 in which acetyl-CoA carboxylase is not overexpressed. The specific productivity of the temperature-shifted culture of JX3_{—}0097 was 0.94 g 3-HP per gDCW in 24 h, a 45-fold increase over the specific productivity of the culture maintained constantly at 30° C. in which the enoyl-ACP reductase was not inactivated.

TABLE 17
Production of 3-HP by JX3_0097.0 in AM2

| Constant 30° C. | | | Shifted to 42° C. | |
|---|---|---|---|---|
| Time (hr) | 3HP (g/L) | OD₆₀₀ | 3HP (g/L) | OD₆₀₀ |
| 0 | 0 | 0.085 | 0.001 | 0.085 |
| 4 | 0.002 | 0.500 | 0.003 | 0.483 |
| 5 | 0.003 | 0.287 | 0.015 | 0.473 |
| 6 | 0.005 | 0.417 | 0.073 | 0.510 |
| 8 | 0.005 | 0.520 | 0.198 | 0.590 |
| 24 | 0.013 | 1.91 | 0.192 | 0.620 |

[0492] The effect of combining the plasmids expressing mcr (malonyl-CoA reductase), pntAB (transhydrogenase), and accABCD (acetyl-CoA carboxylase complex) in the same organism was tested by constructing strain JX3_{—}0098. The Table above shows the production of 3-HP by this strain in AM2 medium. A specific productivity of 0.54 g 3-HP per gDCW in 24 h was obtained in the culture maintained constantly at 30° C., representing a >20-fold increase over strains carrying mcr alone or mcr with either pntAB or accABCD, but not both. Shifting the temperature to inactivate enoyl-ACP reductase resulted in a specific productivity of 2.01 g 3-HP per gDCW in 24 h, a further 3.8-fold increase. Thus the combination of overexpression of pntAB and of accABCD, plus the inactivation of enoyl-ACP reductase via the temperature-sensitive fabI^{ts} allele, resulted in an approximately 500-fold increase in specific productivity of 3-HP by mcr-bearing cells (specific productivity of 2.01 vs. 0.0041 g 3-HP per gDCW in 24 h).

TABLE 18
Production of 3-HP by JX3_0098.0 in AM2 medium

| Constant 30° C. | | | Shifted to 42° C. | |
|---|---|---|---|---|
| Time (hr) | 3HP (g/L) | OD₆₀₀ | 3HP (g/L) | OD₆₀₀ |
| 0 | 0.007 | 0.117 | 0 | 0.13 |
| 4 | 0.013 | 0.303 | 0.017 | 0.47 |
| 5 | 0.017 | 0.600 | 0.060 | 0.75 |
| 6 | 0.033 | 0.730 | 0.107 | 0.87 |
| 8 | 0.053 | 0.9107 | 0.263 | 0.81 |
| 24 | 0.670 | 3.790 | 0.577 | 0.81 |

### Example 9

### Sequence of the fabI^{ts} Mutation

[0493] The nature of the exact sequence change in the fabI^{ts} allele carried by strains JP1111 was reconfirmed. Confirmation of this change allows targeted mutagenesis to generate alternative strains with different temperature sensitivities and mutants with stabilities intermediate between wild type and the fabI392 temperature-sensitive allele, allowing growth at a constant temperature higher than 30° C. while providing the benefit of increased internal malonyl-CoA pools. To confirm the DNA sequence of this segment of the chromosome of a wild type (BW25113) and the JP1111 mutant E. coli, chromosomal DNA was prepared from these strains. These DNA were used as templates in a PCRn reaction with primers:

| SEQ ID NO: 821 | |
|---|---|
| FW043 | ATGGGTTTTCTTTCCGG |
| SEQ ID NO: 822 | |
| FW047 | TTATTTCAGTTCGAGTTCG |

[0494] Thermocyler conditions for the PCRn were: 95° C., 10 min; 30 cycles of 95° C., 10 s; 47° C. increasing to 58° C., 30 s; 72° C., 1 min; followed by a final incubation at 72° C. for 5 min. The PCRn product was separated on an agarose gel and the appropriate sized fragment recovered as described in the Common Methods Section, and sequenced using primers:

| SEQ ID NO: 823 | |
|---|---|
| FW044 | CTATCCATCGCCTACGGTATC |
| SEQ ID NO: 824 | |
| FW045 | CGTTGCAATGGCAAAAGC |
| SEQ ID NO: 825 | |
| FW046 | CGGCGGTTTCAGCATTGC |

[0495] A comparison of the DNA sequence obtained from the fabI392 (SEQ ID NO:769) and wild type strains reveals a single difference between the alleles of C at position 722 of the wild type gene to T (see FIG. 4A), leading to a protein change of Ser at codon 241 to Phe (See FIG. 4B). These changes are identical to those found by Bergler, H., Hogenauer, G., and Turnowsky, F., J. Gen. Microbiol. 138:2093-2100 (1992).

[0496] The identification of the affected residue at codon 241 indicates that targeted mutagenesis at this codon, for example to amino acid residues such as Trp, Tyr, His, Ile, or other amino acids other than Ser or Phe, may result in fabI alleles with different properties than the fabI392 originally isolated in JP1111. Targeted mutagenesis at codons near to codon 241 may also be contemplated to obtain the desired fabI mutants with altered properties.

### Example 10

### Effect on 3-HP Production of Overexpression of Genes from the 3-HP Toleragenic Complex

[0497] A series of strains were constructed carrying plasmids that express mcr (pTrc-P_{trc}-mcr or pSMART(HC)Amp-P_{talA}-mcr) alone or with compatible plasmids carrying representative genes from the 3-HP toleragenic complex (pJ61-aroG, pJ61-thrA, pACYC177-cynTS, pJ61-cynTS). Table 19 categorizes the strains and their characteristics.

TABLE 19
Strain name and characteristics of
strain carrying plasmids bearing
toleragenic complex genes

| Strain name | Host | Plasmids |
|---|---|---|
| JX3_0118 | JP1111 | pTrc-Pₜᵣₑ-mcr |
| JX3_0110 | JP1111 | pTrc-Pₜᵣₑ-mcr + |
| | | pJ61-aroG |
| JX3_0111 | JP1111 | pTrc-Pₜᵣₑ-mcr + |
| | | pJ61-thrA |
| JX3_0112 | JP1111 | pTrc-Pₜᵣₑ-mcr + |
| | | pACYC177-cynTS |
| JX3_0113 | JP1111 | pTrc-Pₜᵣₑ-mcr + |
| | | pJ61-cynTS |
| JX3_0104 | JP1111 | pSMART(HC)Amp-P_{talA}-mcr |
| JX3_0114 | JP1111 | pSMART(HC)Amp-P_{talA}-mcr + |
| | | pJ61-aroG |
| JX3_0119 | JP1111 | pSMART(HC)Amp-P_{talA}-mcr + |
| | | p15A empty vector |
| JX3_0115 | JP1111 | pSMART(HC)Amp-P_{talA}-mcr + |
| | | pJ61-thrA |
| JX3_0116 | JP1111 | pSMART(HC)Amp-P_{talA}-mcr + |
| | | pACYC177-cynTS |
| JX3_0117 | JP1111 | pSMART(HC)Amp-P_{talA}-mcr + |
| | | pJ61-cynTS |
| JX3_0119 | JP1111 | pSMART(HC)Amp-P_{talA}-mcr + |
| | | p15A empty vector |

[0498] Production of 3-HP by strains carrying pTrc-P_{trc}-mcr without and with plasmids carrying genes from the 3-HP toleragenic complex (3HPTGC) is shown in Table 20. 3-HP production was carried out as in Example 6 except cultures were maintained at constant 30° C., and strains were evaluated based on their specific productivity after 24 hr. As shown in Table 20, the specific productivity of strain JX3_{—}0118, which differs from strain JX3_{—}0077 only in the nature of the IPTG-inducible plasmid, was 0.19 g 3-HP/gDCW in 24 h compared to 0.011 g 3-HP per gDCW by JX3_{—}0077. This 17-fold increase in specific productivity by the culture maintained at a constant 30° C. is attributable to increased stability and mcr expression by pTrc-P_{trc}-mcr.

[0499] Expression of genes from the 3-HP toleragenic complex further increases productivity of 3-HP. Expression of aroG in JX3_{—}0110 resulted in a 2.3-fold increase, expression of thrA in JX3_{—}0111 resulted in a 2.2-fold increase, and expression of cynTS in JX3_{—}0112 resulted in a 10.6-fold increase in specific productivity in 24 hr.

TABLE 20

| | | | | Specific |
|---|---|---|---|---|
| | | | | Productivity (g |
| | Time | 3 HP | | 3-HP/gDCW) at |
| Strain | (hr) | (g/L) | OD₆₀₀ | 24 h |
| JX3_0118 | 4 | 0.01 | 0.21 | |
| | 6 | 0.03 | 0.50 | |
| | 8 | 0.06 | 0.87 | |
| | 24 | 0.19 | 3.1 | 0.19 |
| JX3_0110 | 4 | 0.05 | 0.28 | |
| | 6 | 0.09 | 0.51 | |
| | 8 | 0.15 | 0.70 | |
| | 24 | 0.40 | 2.8 | 0.43 |
| JX3_0111 | 4 | 0.04 | 0.26 | |
| | 6 | 0.08 | 0.51 | |
| | 8 | 0.13 | 0.62 | |
| | 24 | 0.33 | 2.4 | 0.42 |
| JX3_0112 | 4 | 0.04 | 0.26 | |
| | 6 | 0.10 | 0.50 | |
| | 8 | 0.20 | 0.64 | |
| | 24 | 0.60 | 0.90 | 2.02 |
| JX3_0113 | 4 | 0.01 | 0.06 | |
| | 6 | 0.02 | 0.20 | |
| | 8 | 0.02 | 0.24 | |
| | 24 | 0.08 | 2.2 | 0.11 |

[0500] Similar results were obtained in strains carrying mcr expressed by pSMART (HC)Amp-P_{talA}-mcr and additional plasmids carrying genes from the 3-HP toleragenic complex. 3-HP production was carried out as in Example 6 except cultures were maintained at constant 30° C., and strains were evaluated based on their specific productivity after 24 hr. Strains carrying the mcr expression plasmid alone (JX3_{—}0104), or with an empty control vector (JX3_{—}0119) had specific productivities of 0.062 or 0.068 g 3-HP per gDCW in 24 hr, respectively. Expression of aroG in JX3_{—}0114 resulted in a 2.4-fold increase, expression of thrA in JX3_{—}0115 resulted in a 2.6-fold increase, and expression of cynTS in JX3_{—}0116 or JX3_{—}0117 resulted in a 2.1-fold increase in specific productivity in 24 hr compared to strain JX3_{—}0119. Thus overexpression of representative genes from the 3-HP toleragenic complex significantly increased the specific productivity of 3-HP even at levels of excreted 3-HP much below those at which the tolerance effects of these genes were first identified. This is an unexpected beneficial result.

TABLE 21
Production of 3-HP by strains carrying
pSMART (HC)Amp-P_{talA}-
mcr and plasmids bearing genes
from the3-HP toleragenic complex

| | | | | Specific |
|---|---|---|---|---|
| | | | | Productivity |
| | | | | (g 3- |
| | Time | 3 HP | | HP/gDCW) |
| Strain | (hr) | (g/L) | OD₆₀₀ | at 24 h |
| JX3_0104 | 4 | 0.01 | 0.01 | |
| | 6 | 0.01 | 0.30 | |
| | 8 | 0.02 | 0.80 | |
| | 24 | 0.04 | 1.94 | 0.062 |
| JX3_0119 | 4 | 0.01 | 0.11 | |
| | 6 | 0.01 | 0.4 | |
| | 8 | 0.02 | 0.92 | |
| | 24 | 0.04 | 1.79 | 0.68 |
| JX3_0114 | 4 | 0.03 | 0.19 | |
| | 6 | 0.04 | 0.18 | |
| | 8 | 0.05 | 0.2 | |
| | 24 | 0.13 | 2.38 | 0.17 |
| JX3_0115 | 4 | 0.03 | 0.08 | |
| | 6 | 0.03 | 0.25 | |
| | 8 | 0.04 | 0.32 | |
| | 24 | 0.09 | 1.55 | 0.18 |
| JX3_0116 | 4 | 0.03 | 0.13 | |
| | 6 | 0.04 | 0.30 | |
| | 8 | 0.05 | 0.40 | |
| | 24 | 0.10 | 2202 | 0.15 |
| JX3_0117 | 4 | 0.04 | 0.18 | |
| | 6 | 0.05 | 0.31 | |
| | 8 | 0.07 | 0.73 | |
| | 24 | 0.11 | 2.4 | 0.14 |

### Example 11

### Effect on Volumetric 3-HP Production in 1 L Fermentations, of Increased Malonyl-coA Precursor Pools Using Temperature Sensitive Fatty Acid Synthesis Mutants

[0501] Four 1 L fed batch fermentation experiments were carried out using the strain JX3_{—}0098. Briefly, seed cultures were started and grown overnight in LB media (Luria Broth) and used to inoculate four 1 L New Brunswick fermentation vessels. The first vessel contained defined AM2 medium at 30° C., IPTG induction was added at 2 mM at an OD₆₀₀ nm of 2, additional glucose feed was initiated when glucose was depleted to between 1-2 g/L. The temperature was shifted 37° C. over 1 hr at target OD of 10. A high glucose feed rate was maintained at >3 g/L/hr until glucose began to accumulate at concentrations greater than 1 g/L at which time feed rate was varied to maintain residual glucose between 1 and 10 g/L. The second vessel contained defined AM2 medium at 30° C., IPTG induction was added at 2 mM at an OD₆₀₀ nm of 2, additional glucose feed was initiated when glucose was depleted to 0 g/L. The temperature was shifted 37° C. over 1 hr at target OD of 10. The glucose feed rate was maintained less than or equal to 3 g/L/hr. The third vessel contained rich medium at 30° C., IPTG induction was added at 2 mM at an OD₆₀₀ nm of 2, additional glucose feed was initiated when glucose was depleted to 1-2 g/L. The temperature was shifted 37° C. over 1 hr at target OD of 10. A high glucose feed rate was maintained at >3 g/L/hr until glucose began to accumulate at concentrations greater than 1 g/L at which time feed rate was varied to maintain residual glucose between 1 and 10 g/L. The fourth vessel contained rich medium at 30° C., IPTG induction was added at 2 mM at an OD₆₀₀ nm of 2, additional glucose feed was initiated when glucose was depleted to 0 g/L. The temperature was shifted 37° C. over 1 hr at target OD of 10. The glucose feed rate was maintained less than or equal to 3 g/L/hr.

[0502] Growth profiles are shown in FIG. 5, arrows indicate the initiation of the temperature shift. All fermentation vessels were maintained at pH=7.4 by the controlled addition of 50% v/v ammonium hydroxide (Fisher Scientific). All vessels were maintained at least 20% dissolved oxygen by aeration with sparged filtered air. Samples were taken for optical density measurements as well as HPLC analysis for 3-HP concentration. (Refer to common methods). Maximum volumetric productivities reached 2.99 g/L/hr. In addition, the figures demonstrate the correlation between the 3-4 hour average biomass concentration and 3-4 hr average volumetric productivity rates in these 4 vessels.

### Example 11A

### Production of 3-HP in 250 Liter Fermentations

[0503] Examples of two fed batch fermentations in a 250 liter volume stainless steel fermentor were carried out using the strain BX3_{—}0240, the genotype of which is described elsewhere herein. A two stage seed process was used to generate inoculum for the 250 L fermentor. In the first stage, one ml of glycerol stock of the strain was inoculated into 100 ml of TB medium (Terrific Broth) in a shake flask and incubated at 30° C. until the OD₆₀₀ was between 3 and 4. In the second stage, 85 ml of the shake flask culture was aseptically transferred to a 14 L New Brunswick fermentor containing 8 L of TB medium and grown at 30° C. and 500 rpm agitation until the OD₆₀₀ was between 5 and 6. The culture from the 14 L fermentor was used to aseptically inoculate the 250 L volume bioreactor containing defined FM5 medium (see Common Methods Section) at 30° C. so that the post-inoculation volume was 155 L.

[0504] In the first fermentation, induction was effected by adding IPTG to a final concentration of 2 mM at an OD₆₀₀ of 20. Glucose feed (consisting of a 700 g/L glucose solution) was initiated when the residual glucose in the fermentor was 10-15 g/L. The feed rate was adjusted to maintain the residual glucose between 10 and 15 g/L until about the last 6 hours of the fermentation when the feed rate was reduced so that the residual glucose at harvest was <1 g/L to facilitate 3-HP recovery. Three hours after induction, the temperature was shifted to 37° C. over 1 hour. At the time the temperature shift was initiated, the dissolved oxygen (DO) set point was changed from 20% of air saturation to a point where the DO was maintained between 2-4% of air saturation. The fermentation broth was harvested 48 hours after inoculation. The final broth volume was 169.5 liters.

[0505] The second fermentation was run identically to the first example fermentation described above except for the following differences: induction with IPTG was effected at an OD₆₀₀ of 15, the residual glucose (after the glucose feed was started) ranged between 3-30 g/L, and the fermentation broth was harvested at 38.5 hours after inoculation so that the final residual glucose concentration was 25 g/L. The final broth volume was 167 liters.

[0506] Each fermentation broth was maintained at a pH of approximately 7.4 by the controlled addition of anhydrous ammonia gas. Dissolved oxygen was maintained at the desired levels by aeration with sparged, sterile-filtered air. Samples were taken for optical density measurements as well as HPLC analysis for 3-HP concentration. In the first fermentation, the maximum biomass concentration was 12.0 g dry cell weight/L and the biomass concentration at harvest was 11.4 g dry cell weight/L. The maximum 3-HP titer in this fermentation was 20.7 g/L. In the second fermentation, the maximum biomass concentration was 10.2 g dry cell weight/L and the biomass concentration at harvest was 9.5 g dry cell weight/L. The maximum 3-HP titer in this fermentation was 20.7 g/L.

### Example 11B

### Effect of Growth Medium on 3-HP Production in 1 L Fermentations

[0507] Eight 1 L fed batch fermentation experiments were carried out using the strain BX3_{—}0240. Seed culture was started from 1 ml of glycerol stock of the strain inoculated into 400 ml of TB medium (Terrific Broth) in a shake flask and incubated at 30° C. until the OD₆₀₀ was between 5 and 6. The shake flask culture was used to aseptically inoculate each 1 L volume bioreactor so that the post-inoculation volume was 653 ml in each vessel.

[0508] Fermentors 1 and 2 contained defined FM3 medium. Fermentors 3-5 contained defined FM4 medium. Fermentors 6-8 contained defined FM5 medium. All media formulations are listed in the Common Methods Section. In each fermentor, the initial temperature was 30° C.

[0509] Induction was effected by adding IPTG to a final concentration of 2 mM at OD₆₀₀ values of 15-16. Glucose feed (consisting of a 500 g/L glucose solution for FM3 and FM5 media and 500 g/L glucose plus 75 mM MgSO₄ for FM4) was initiated when the residual glucose in the fermentor was about 10 g/L. The feed rate was adjusted to maintain the residual glucose>3 g/L (the exception was fermentor 8 in which the residual glucose temporarily reached 0.1 g/L before the feed rate was increased). Three hours after induction, the temperature was shifted to 37° C. over 1 hour. At the time the temperature shift was initiated, the dissolved oxygen (DO) set point was changed from 20% of air saturation to 1% of air saturation. The fermentations were stopped 48 hours after inoculation.

[0510] The broth of each fermentor was maintained at a pH of approximately 7.4 by the controlled addition of a pH titrant. The pH titrant for FM3 medium was 5 M NaOH and for FM4 and FM5 it was a 50:50 mixture of concentrated ammonium hydroxide and water. Dissolved oxygen was maintained at the desired levels by sparging with sterile-filtered air. Samples were taken for optical density measurements as well as HPLC analysis for 3-HP concentration. The maximum biomass concentration and the biomass concentration at harvest as well as the maximum 3-HP titer in each fermentor are summarized in the Table 22 below.

TABLE 22

| | | Maximum | Biomass Conc. | Maximum |
|---|---|---|---|---|
| Fermentor | Growth | Biomass Conc. | at Harvest | 3HP |
| No. | Medium | (g DCW/L) | (g DCW/L) | Titer (g/L) |
| 1 | FM3 | 8.7 | 8.7 | 12.3 |
| 2 | FM3 | 9.6 | 9.5 | 16.7 |
| 3 | FM4 | 10.9 | 10.9 | 20.7 |
| 4 | FM4 | 11.5 | 11.5 | 18.3 |
| 5 | FM4 | 11.3 | 11.3 | 22.1 |
| 6 | FM5 | 11.3 | 11.3 | 35.2 |
| 7 | FM5 | 11.2 | 11.0 | 34.0 |
| 8 | FM5 | 11.6 | 10.6 | 31.2 |

### Example 11C

### Effect of Batch Phosphate Concentration on 3-HP Production in 1 L Fermentations

[0511] Four 1 L fed batch fermentation experiments were carried out using the strain BX3_{—}0240. Seed culture was started from 1 ml of glycerol stock of the strain inoculated into 400 ml of TB medium (Terrific Broth) in a shake flask and incubated at 30° C. until the OD₆₀₀ was between 5 and 7. The shake flask culture was used to aseptically inoculate each 1 L volume bioreactor so that the post-inoculation volume was 653 ml in each vessel.

[0512] All fermentors contained defined FM5 growth medium, but each had different initial concentrations of monobasic and dibasic potassium phosphate. The phosphate concentrations in the batch medium in each fermentor are summarized in the Table 23. The FM5 media formulation is listed in the Common Methods Section.

TABLE 23

| | K₂HPO₄ | KH₂PO₄ |
|---|---|---|
| Fermentor | conc. in batch | conc. in batch |
| No. | medium (g/L) | medium (g/L) |
| 1 | 6.1 | 1.92 |
| 2 | 2.63 | 1.38 |
| 3 | 0.87 | 0.14 |
| 4 | 0.043 | 0.070 |

[0513] In each fermentor, the initial temperature was 30° C. Induction was effected by adding IPTG to a final concentration of 2 mM when the OD₆₀₀ values were at the following values: fermentor 1, 15.3; fermentor 2, 16.0; fermentor 3, 18.1; fermentor 4, 18.4. Glucose feed (consisting of a 500 g/L glucose solution for FM3 and FM5 media and 500 g/L glucose plus 75 mM MgSO₄ for FM4) was initiated when the residual glucose in the fermentor was about 10 g/L. The feed rate was adjusted to maintain the residual glucose>6.5 g/L. Three hours after induction, the temperature was shifted to 37° C. over 1 hour. At the time the temperature shift was initiated, the dissolved oxygen (DO) set point was changed from 20% of air saturation to 1% of air saturation. The fermentations were stopped 48 hours after inoculation.

[0514] The broth of each fermentor was maintained at a pH of 7.4 by the controlled addition of a 50:50 mixture of concentrated ammonium hydroxide and water. Dissolved oxygen was maintained at the desired levels by sparging with sterile-filtered air. Samples were taken for optical density measurements as well as HPLC analysis for 3-HP concentration. The maximum biomass concentration and the biomass concentration at harvest as well as the maximum 3-HP titer in each fermentor are summarized in the Table 24 below.

TABLE 24

| | Maximum | Biomass Conc. | Maximum |
|---|---|---|---|
| Fermentor | Biomass Conc. | at Harvest | 3 HP |
| No. | (g DCW/L) | (g DCW/L) | Titer (g/L) |
| 1 | 9.6 | 8.4 | 23.7 |
| 2 | 11.3 | 11.3 | 27.8 |
| 3 | 14.8 | 12.9 | 39.8 |
| 4 | 12.3 | 10.9 | 44.1 |

### Example 11D

### 3-HP Production in 1 L Fermentations

[0515] Two 1 L fed batch fermentation experiments were carried out using the strain BX3_{—}0240. Seed culture was started from 1 mL of glycerol stock of the strain inoculated into 100 mL of TB medium (Terrific Broth) in a shake flask and incubated at 30° C. until the OD₆₀₀ was between 5 and 6. The shake flask culture was used to aseptically inoculate (5% volume/volume) each 1 L volume bioreactor so that the post-inoculation volume was 800 mL in each vessel. The fermentors used in this experiment were Das Gip fed-batch pro parallel fermentation system (DASGIP AG, Julich, Germany, model SR07000DLS). The fermentation system included real-time monitoring and control of dissolved oxygen (% DO), pH, temperature, agitation, and feeding. Fermentors 1 and 2 contained defined FM5 medium, made as shown in the Common Methods Section except that Citric Acid was added at 2.0 g/L and MgSO₄ was added at 0.40 g/L. In each fermentor, the initial temperature was 30° C. Induction was effected by adding IPTG to a final concentration of 2 mM at OD₆₀₀ values of 17-19, which corresponded to a time post-inoculation of 14.5 hr. Glucose feed (consisting of a 500 g/L glucose solution) was initiated when the residual glucose in the fermentor was about 1 g/L. The feed rate was adjusted to maintain the residual glucose>3 g/L. Three hours after induction, the temperature was shifted to 37° C. over 1 hour. At the time the temperature shift was initiated, the OTR was set to 40 mmol/L-hr by setting airflow and agitation to 1.08 vvm and 1000 rpm respectively. Compressed air at 2 bar was used as the air feed. The broth of each fermentor was maintained at a pH of approximately 7.4 by the controlled addition of a pH titrant. Two hours subsequent to IPTG induction, the pH titrant was changed from 50% NH₄(OH) to 7.4 M NaOH. Samples were taken for optical density measurements as well as HPLC analysis for 3-HP concentration. The maximum biomass concentration and the biomass concentration at harvest as well as the maximum 3-HP titer in each fermentor are summarized in the Table 25 below.

TABLE 25

| | | | | Yield of |
|---|---|---|---|---|
| | Maximum | | | 3-HP At |
| | Biomass | Biomass Conc. | | 69 hrs |
| Fermentor | Conc. (g | at Harvest (g | Total 3-HP | (g3-HP/g |
| No. | DCW/L) | DCW/L) | (g) at 69 hrs | glucose) |
| 1 | 10.5 | 8.7 | 49.0 | 0.46 |
| 2 | 10.5 | 8.7 | 47.8 | 0.46 |

[0516] The following Table 26 provides a summary of concentrations of metabolic products obtained in the fermentation broth at the indicated time in hours.

TABLE 26

| | Time | 3-HP | Pyruvate | Succinate | Lactate |
|---|---|---|---|---|---|
| Replicate | (hrs) | (g/L) | (g/L) | (g/L) | (g/L) |
| 1 | 0 | 0 | 0.341 | 0.328 | 0 |
| 1 | 45 | 35.128 | 5.596 | 0 | 0 |
| 1 | 69 | 36.05 | 9.179 | 0 | 0 |
| 2 | 0 | 0 | 0.346 | 0.376 | 0 |
| 2 | 45 | 31.188 | 8.407 | 0 | 0 |
| 2 | 69 | 35.139 | 13.143 | 0 | 0 |

| Fumarate | Glutamate | Glutamine | Glycerol | Alanine |
|---|---|---|---|---|
| (g/L) | (g/L) | (g/L) | (g/L) | (g/L) |
| 0.002 | 0.006 | 0 | 0.563 | 0.139 |
| 0.013 | 0.959 | 0 | 0.160 | 0.104 |
| 0.003 | 1.77 | 0 | 0.244 | 0.075 |
| 0.002 | 0.893 | 0.075 | 0.471 | 0.109 |
| 0.004 | 0.796 | 0 | 0.347 | 0.084 |
| 0.011 | 1.23 | 0 | 0.481 | 0.077 |

### Example 11E

### 3-HP Production in 1 L Fermentations

[0517] Four 1 L fed batch fermentation experiments were carried out using the strain BX3_{—}0240. Seed culture was started from 1 ml of glycerol stock of the strain inoculated into 100 mL of TB medium (Terrific Broth) in a shake flask and incubated at 30° C. until the OD₆₀₀ was between 5 and 6. The shake flask culture was used to aseptically inoculate (5% volume/volume) each 1 L volume bioreactor so that the post-inoculation volume was 800 ml in each vessel. The fermentors used in this experiment were Das Gip fed-batch pro parallel fermentation system (DASGIP AG, Julich, Germany, model SR07000DLS). The fermentation system included real-time monitoring and control of dissolved oxygen (% DO), pH, temperature, agitation, and feeding. All fermentors contained defined FM5 medium, made as shown in the Common Methods Section except that Citric Acid was added at 2.0 g/L and MgSO₄ was added at 0.40 g/L. In each fermentor, the initial temperature was 30° C. Induction was effected by adding IPTG to a final concentration of 2 mM at OD₆₀₀ values of 15-19, which corresponded to a time post-inoculation of 15.75 hr. Glucose feed (consisting of a 500 g/L glucose solution) was initiated when the residual glucose in the fermentor was about 3 g/L. The feed rate was adjusted to maintain the residual glucose>3 g/L. Three hours after induction, the temperature was shifted to 37° C. over 1 hour. The broth of each fermentor was maintained at a pH of approximately 7.4 by the controlled addition of a pH titrant 50% NH4(OH). At the time the temperature shift was initiated, the OTR was changed for each fermentor by varying the agitation and airflow according to Table 27. Compressed air at (2 bar was used as the air feed) Samples were taken for optical density measurements as well as HPLC analysis for 3-HP concentration. The maximum biomass concentration and the biomass concentration at harvest as well as the maximum 3-HP titer in each fermentor are summarized in the Table 27 below.

TABLE 27

| | | | Biomass Conc. | 3HP Titer |
|---|---|---|---|---|
| Fermentor | Airflow | Agitation during | at Harvest (g | (g/L) at 37 |
| No. | (vvm) | Production (rpm) | DCW/L) | hrs |
| 1 | 1.08 | 1000 | 8.6 | 14.9 |
| 2 | 1.08 | 800 | 9.0 | 7.9 |
| 3 | 1.08 | 600 | 8.2 | 0.5 |
| 4 | 1.08 | 400 | 5.9 | 0.5 |

### Example 11F

### 3-HP Production in 1.8 L Fermentation

[0518] A 1.8 L fed batch fermentation experiment was carried out using the strain BX3_{—}0240. Seed culture was started from 1 ml of glycerol stock of the strain inoculated into 105 ml of TB medium (Terrific Broth) in a shake flask and incubated at 30° C. until the OD600 was between 5 and 7. 90 ml of the shake flask culture was used to aseptically inoculate 1.71 L of FM5 growth medium, except that the phosphate concentrations were 0.33 g/L K2HPO4 and 0.17 g/L KH2PO4 in batch medium. The other ingredients in the FM5 media formulation are as listed in the Common Methods Section. The initial temperature in the fermentor was 30° C. Induction was effected by adding IPTG to a final concentration of 2 mM when the OD600 value was at 15.46. Glucose feed (consisting of a 500 g/L glucose solution) was initiated when the residual glucose in the fermentor was about 10 g/L. The feed rate was adjusted to maintain the residual glucose>6.5 g/L. Three hours after induction, the temperature was shifted to 37° C. over 1 hour. At the time the temperature shift was initiated, the dissolved oxygen (DO) set point was changed from 20% of air saturation to 1% of air saturation. The broth of each fermentor was maintained at a pH of 7.4 by the controlled addition of a 50:50 mixture of concentrated ammonium hydroxide and water. Dissolved oxygen was maintained at the desired levels by sparging with sterile-filtered air. Samples were taken for optical density measurements as well as HPLC analysis for 3-HP concentration. The maximum final biomass concentration was 9.84 g/L, the maximum 3-HP titer was 48.4 g/L with a final yield from glucose of 0.53 g 3-HP/g glucose.

### Example 12

### Strain Construction for Further Evaluations of 3-HP Production

[0519] According to the respective combinations indicated in Table 28 below, the plasmids described herein (e.g., see Example 1) were introduced into the respective strains. All plasmids were introduced at the same time via electroporation using standard methods. Transformed cells were grown on the appropriate media with antibiotic supplementation and colonies were selected based on their appropriate growth on the selective media. As summarized in Table 28, the mcr expression plasmids pTrc-ptrc-mcr or pACYC(kan)-ptalA-mcr were transformed into two strains derived from E. coli BW25113 (F-, Δ(araD-araB)567, ΔlacZ4787(::rrnB-3), lamba-, rph-1, Δ(rhaD-rhaB)568, hsdR514), these strains comprising additional chromosomal modifications introduced using Gene Bridges technology as described in the Common Methods Section. Strain BX_{—}0590 comprises additional deletions of the ldhA, pflB, mgsA, and poxB genes. Strain BX_{—}0591 comprises the additional deletions of Strain BX_{—}0590 and an additional deletion of the ack_pta genes. Transformants were subsequently selected for on media containing the appropriate combination of antibiotics.

TABLE 28

| Strain name | Host | Plasmids |
|---|---|---|
| BX3_0194 | BX_0590 | PTrc-ptrc-mcr |
| BX3_0195 | BX_0591 | PTrc-ptrc-mcr |
| BX3_0206 | BX_0590 | pACYC(kan)-ptalA-mcr |

### Example 12A

### Construction of Additional Strains for Evaluation

[0520] Part 1: Gene Deletions

[0521] The homologous recombination method using Red/ET recombination, as described elsewhere herein, was employed for gene deletion in E. coli strains. This method is known to those of ordinary skill in the art and described in U.S. Pat. Nos. 6,355,412 and 6,509,156, issued to Stewart et al. and incorporated by reference herein for its teachings of this method. Material and kits for such method are available from Gene Bridges (Gene Bridges GmbH, Heidelberg (formerly Dresden), Germany, <<www.genebridges.com>>), and the method proceeded by following the manufacturer's instructions. The method replaces the target gene by a selectable marker via homologous recombination performed by the recombinase from λ-phage. The host organism expressing λ-red recombinase is transformed with a linear DNA product coding for a selectable marker flanked by the terminal regions (generally ˜50 bp, and alternatively up to about ˜300 bp) homologous with the target gene or promoter sequence. The marker is thereafter removed by another recombination step performed by a plasmid vector carrying the FLP-recombinase, or another recombinase, such as Cre.

[0522] Specific deletions were constructed by amplification using PCRn from the Keio strains carrying particular deletions using primers as specified below. The Keio collection was obtained from Open Biosystems (Huntsville, Ala. USA 35806). Individual clones may be purchased from the Yale Genetic Stock Center (New Haven, Conn. USA 06520). These strains each contain a kanamycin marker in place of the deleted gene. In cases where the desired deletion was not in a Keio strain, for example ackA-pta, the deletion was constructed by the above-noted recombination method using the kanamycin resistance marker to replace the deleted sequence, followed by selection of a kanamycin resistance clone having the deletion. The PCRn products were introduced into targeted strains using the above-noted recombination method. Combinations of deletions were generated sequentially to obtain strains as described in the following parts of this example.

TABLE 29

| Plasmid | Keio Clone | Gene | Forward Primer | Reverse Primer |
|---|---|---|---|---|
| template | Number | Deletion | SEQ ID NO: | SEQ ID NO: |
| | JW1375 | ldhA | | |
| | JW0886 | pflB | 829 | 842 |
| | JW5129 | mgsA | 830 | 843 |
| | JW0855 | poxB | 831 | 844 |
| | JW2880 | serA | 832 | 845 |
| | JW4364 | arcA | 833 | 846 |
| | JW4356 | trpR | 834 | 847 |
| | JW3561 | aldB | 835 | 848 |
| | JW1412 | aldA | 836 | 849 |
| | JW1293 | puuC | 837 | 850 |
| | JW2755 | relA | 838 | 851 |
| pKD4 | | spoT | 839 | 852 |
| pKD4 | | ackA-pta | 840 | 853 |
| | JW1228 | adhE | 841 | 854 |

[0523] Table 31 shows strains having genotypes that comprise deletions according to the methods of this Part.

[0524] Part 2: Construction of Strains BW_{—}595 and BW_{—}651 Having a fabI Mutation

[0525] The fabI^{ts} mutation (Ser241→Phe) in E. coli strain JP1111 significantly increases the malonyl-CoA concentration when cells are grown at the nonpermissive temperature (37° C.) and thus produces more 3-HP at this temperature. However, JP1111 is not an ideal strain for transitioning into pilot and commercial scale, since it is the product of NTG mutagenesis and thus may harbor unknown mutations, carries mutations in the stringency regulatory factors relA and spoT, and has enhanced conjugation propensity due to the presence of an Hfr factor. Thus the fabI^{ts} mutation was moved into strain BX_{—}591, a strain developed from the well-characterized BW23115 carrying the additional mutations ΔldhA, ΔpflB, ΔmgsA, ΔpoxB, Δpta-ack. These mutations were generated by the sequential application of the gene deletion method described in Part 1 above.

[0526] The fabI^{ts} gene with 600 bp of upstream and downstream DNA sequence was isolated from JP1111 genomic DNA by PCRn using primers:

| SEQ ID NO: 855 | |
|---|---|
| FW56: | 5′-CCAGTGGGGAGCTACATTCTC; |
| and | |
| SEQ ID NO: 856 | |
| FW57: | 5′-CGTCATTCAGATGCTGGCGCGATC. |

[0527] The FRT::kan::FRT cassette was then inserted at a SmaI site downstream of the fabI^{ts} to generate plasmid pSMART(HC)amp_fabI^{ts}_FRT::kan::FRT. This plasmid was used as template DNA and the region between primers:

| SEQ ID NO: 857 | |
|---|---|
| FW043: | 5′- ATGGGTTTTCTTTCCGG |
| and | |
| (SEQ ID NO: 856) | |
| FW057 | |

was amplified in a PCRn using KOD HS DNA polymerase (Novagen). The reaction was treated with DpnI to fragment the plasmid template and the amplification fragment was gel-purified and recovered using the DNA Clean and Concentrator kit (Zymo Research, Orange, Calif.). Strain BX_{—}591 was transformed with pSIM5 (Datta, S., et al., Gene 379:109-115, 2006) and expression of the lambda red genes carried on this plasmid were induced by incubation at 42° C. for 15 min.

[0528] Electrocompetent cells were made by standard methods. These cells were transformed with the amplification fragment bearing the fabI^{ts}_FRT::kan::FRT cassette and transformant colonies isolated on LB plates containing 35 μg/ml kanamycin at 30° C. Individual colonies were purified by restreaking, and tested for temperature sensitivity by growth in liquid medium at 30° C. and 42° C. Compared to wildtype parental strain, the strain bearing the fabI^{ts} allele grows poorly at 42° C. but exhibited comparable growth at 30° C. Correct insertion of the FRT::kan::FRT marker was verified by colony PCRn, and the fabI^{ts} kan^{R} strain was designated BX_{—}594.

[0529] To allow use of the kan^{R} marker on plasmids, the marker incorporated in the chromosome adjacent to fabI^{ts} was replaced with a DNA fragment encoding resistance to zeocin. The zeoR gene was amplified by PCRn from plasmid pJ402 (DNA 2.0, Menlo Park, Calif.) using primers:

HL018:
SEQ ID NO: 858
5′-CAGGTTTGCGGCGTCCAGCGGTTATGTAACTACTATTCGGC
GCGACTTACGCCGCTCCCCGCTCGCGATAATGTGGTAGC;
and
HL019:
SEQ ID NO: 859
5′-AATAAAACCAATGATTTGGCTAATGATCACACAGTCCCAGG
CAGTAAGACCGACGTCATTCTATCATGCCATACCGCGAA.

[0530] The reaction was treated with DpnI and gel-purified as above. Strain BX_{—}594 was transformed with pKD46 (Datsenko and Wanner, Proc. Natl. Acad. Sci. USA 96: 6640-6645, 2000) and the lambda red genes carried on this plasmid were induced by the addition of L-arabinose to 1 mM for 2 hr. Electrocompetent cells were made by standard methods (e.g, Sambrook and Russell, 2001). These cells were transformed with the zeoR fragment and transformants selected for on LB plates formulated without NaCl and with 25 μg/ml zeocin. Plates were kept in the dark by wrapping in aluminum foil, and incubated at 30° C. A zeocin-resistant, kanamycin-sensitive strain isolated by this method was designated BX_{—}595. Retention of the fabI^{ts} allele was confirmed by growth as above.

[0531] Strain BX_{—}651 was constructed by transferring the fabI^{ts}-zeoR cassette from BX_{—}595 to strain BW25113 which does not carry mutations in metabolic genes. A DNA fragment carrying this cassette was obtained by PCRn using BX_{—}595 chromosomal DNA and primers FW043 (see above) and
[0532] SEQ ID NO:860 FW65: 5′-GAGATAAGCCTGAAATGTCGC.

[0533] The PCRn product was purified and concentrated using the DNA Clean and Concentrator kit (Zymo Research, Orange, Calif.). Strain BW25113 was transformed with pRedD/ET (Gene Bridges GmBH, Heidelberg, Germany) and the lambda red genes carried on this plasmid were induced by the addition of L-arabinose to 5 mM for 2 hr. Electrocompetent cells were made by standard methods, and transformed with the fabI^{ts}-zeoR DNA fragment. Transformants were plated as above on zeocin, and clones bearing the temperature-sensitive allele verified by growth at 30° C. and 42° C. as described above.

[0534] Part 3: Promoter Replacement for Selected Genes in Chromosome

[0535] The homologous recombination method described elsewhere herein was employed to replace promoters of various genes. As noted, use of Red/ET recombination is known to those of ordinary skill in the art and described in U.S. Pat. Nos. 6,355,412 and 6,509,156, issued to Stewart et al. and incorporated by reference herein for its teachings of this method. Material and kits for such method are available from Gene Bridges (Gene Bridges GmbH, Heidelberg, Germany, <<www.genebridges.com>>), and the method may proceed by following the manufacturer's instructions. The method involves replacement of the target gene (or, in this case, a promoter region) by a selectable marker via homologous recombination performed by the recombinase from λ-phage. The host organism expressing λ-red recombinase is transformed with a linear DNA product coding for a selectable marker flanked by the terminal regions (generally ˜50 bp, and alternatively up to about ˜300 bp) homologous with the target gene or promoter sequence. The marker can then be removed by another recombination step performed by a plasmid vector carrying the FLP-recombinase, or another recombinase, such as Cre. This method was used according to manufacturer's instructions. Template sequences, each comprising end sequences to achieve the recombination to replace a native promoter for the indicated gene of interest, the desired replacement promoter, and an antibiotic marker sequence, were synthesized by an outside manufacturer (Integrated DNA Technologies, Coralville, Iowa). These sequences are designed to replace the native promoter in front of these genes with a T5 promoter. The T5-aceEF cassette (SEQ ID NO:863) also includes a zeocin resistance cassette flanked by loxP sites. The T5-pntAB (SEQ ID NO:864), T5-udhA (SEQ ID NO:865) and T5-cynTS (SEQ ID NO:866) cassettes each include a blasticidin resistance cassette flanked by loxP sites. Also, T5-cynTS (SEQ ID NO:866) comprises modified loxP sites in accordance with Lambert et al., AEM 73(4) p 1126-1135.

[0536] Each cassette first is used as a template for PCRn amplification to generate a PCRn product using the primers CAGTCCAGTTACGCTGGAGTC (SEQ ID NO:861), and ACTGACCATTTAAATCATACCTGACC (SEQ ID NO:862). This PCRn product is used for electroporation (using standard methods such as described elsewhere herein) and recombination into the genome following the Red/ET recombination method of Gene Bridges described above. After transformation positive recombinants are selected on media containing zeocin or blasticidin antibiotics. Curing of the resistance marker is accomplished by expression of the Cre-recombinase according to standard methods. Table 31 shows strains having genotypes that comprise replaced promoters. These are shown as “T5” followed by the affected gene(s).

[0537] Part 4: Construction of Plasmids

[0538] The following table summarizes the construction of plasmids that were used in strains described below. To make the plasmids, a respective gene or gene region of interest was isolated by either PCRn amplification and restriction enzyme (RE) digestion or direct restriction enzyme digestion of an appropriate source carrying the gene. The isolated gene was then ligated into the desired vector, transformed into E. coli 10G (Lucigen, Middleton, Wis.) competent cells, screened by restriction mapping and confirmed by DNA sequencing using standard molecular biology procedures (e.g., Sambrook and Russell, 2001).

[0539] It is noted that among these plasmids are those that comprise mono-functional malonyl-CoA reductase activity. Particularly, truncated portions of malonyl-CoA reductase from C. aurantiacus were constructed by use of PCRn primers adjacent, respectively, to nucleotide bases encoding amino acid residues 366 and 1220, and 496 and 1220, of the codon-optimized malonyl-CoA reductase from pTRC-ptrc-mcr-amp. Also, a malonyl-CoA reductase from Erythrobacter sp. was incorporated into another plasmid. As for other plasmids, these were incorporated into strains and evaluated as described below.

TABLE 30

| | | | Cloning | | |
|---|---|---|---|---|---|
| Gene(s) or | Vector and | Catalog | Method/Gene(s) | Plasmid | Plasmid |
| Region Name | *Supplier | Number | Source | Name | SEQ ID NO: |
| Erythrobacter sp | pTRCHisA | V360-20 | RE (NcoI/BgIII)/ | pTrc-ptrc- | 871 |
| MCR | *A | | pUC 57-Eb mcr | Ebmcr-amp | |
| | | | (SEQ ID NO: 905) | | |
| Truncated C. | pTRCHisA | V360-20 | PCRn, RE | pTrc-ptrc- | 872 |
| aurantiacus mcr | *A | | (NcoI/HindIII)/ | (366- | |
| (366-1220) | | | pTRC-ptrc mcr- | 1220)mcr- | |
| | | | amp | ptrc-ydfG- | |
| | | | | kan | |
| Truncated C. | pTRCHisA | V360-20 | PCRn, RE | pTrc-ptrc- | 873 |
| aurantiacus mcr | *A | | (NcoI/HindIII)/ | ydfG-ptrc- | |
| (496-1220) | | | pTRC-ptrc mcr- | (496- | |
| | | | amp | 1220)mcr- | |
| | | | | amp | |
| mcr | pTRCHisA | V360-20 | PCRn, RE | pTrc-ptrc- | 874 |
| | *A | | (NcoI/HindIII)/ | mcr-amp | |
| | | | SEQ ID No. 003 | | |
| mcr | pTRCHisA | V360-20 | RE (Ahdl, | pTrc-ptrc- | 875 |
| | *A | | blunted) for Kan | mcr-kan | |
| | | | insertion/pTRC- | | |
| | | | ptrc mcr-amp | | |
| mcr/cynTS | pTRCHisA | V360-20 | RE/(NdeI, | pTrc-ptrc | 876 |
| | *A | | blunted: pTRC | mcr-kan- | |
| | | | ptrc-mcr kan), | cynTS | |
| | | | (EcoRV: | | |
| | | | pSMARTHC | | |
| | | | am pcynTS) | | |
| accABCD | pJ251 | N/A | RE (EcoNI, AseI, | pJ251-cat- | 877 |
| | *C | | blunted) for Cat | PtpiA- | |
| | | | insertion/SEQ ID | accAD- | |
| | | | No 820 | PrpiA-accBC | |
| pntAB | pACYC184 | E4152S | RE (NruI, PciI, | pACYC184- | 878 |
| | cat | | blunted) self- | cat-PtalA- | |
| | *B | | ligate/ | pntAB | |
| | | | pACYC184-cat- | | |
| | | | PtpiA-accAD- | | |
| | | | PrpiA-accBC- | | |
| | | | ptalA-pntAB | | |
| acccABCD/pntAB | pACYC184 | E41525 | RE/( EcoRV,AvaI, | pACYC184- | 879 |
| | cat | | BseB1, blunted: | cat-PtpiA- | |
| | *B | | pACYC184), | accAD- | |
| | | | (BamHI, blunted: | PrpiA- | |
| | | | pJ244-pntAB- | accBC- | |
| | | | accABCD) | ptalA-pntAB | |
| accABCD/udhA | pACYC184 | E4152S | RE (SwaI, ApaI)/ | pACYC184- | 880 |
| | cat | | pJ244-pTaI-udhA | cat-PtpiA- | |
| | *B | | | accAD- | |
| | | | | PrpiA- | |
| | | | | accBC- | |
| | | | | ptalA-udhA | |
| accABCD/T5- | pACYC184 | E4152S | RE (SwaI, NdeI)/ | pACYC184- | 881 |
| udhA | cat | | pACYC184-cat- | cat-PtpiA- | |
| | *B | | PtpiA-accAD- | accAD- | |
| | | | PrpiA-accBC | PrpiA- | |
| | | | PCRn, RE (PmeI, | accBC-T5- | |
| | | | NdeI)/BX_00635 | udhA | |
| mcr/serA | pTRCHisA | V360-20 | RE (PciI, blunted) | pTrc-ptrc | 882 |
| | *A | | for pTpiA serA | mcr-kan- | |
| | | | insertion/SEQ ID | PtpiA-serA | |
| | | | No. 0047 | | |
| fabF | pTRCHisA | V360-20 | PCRn, RE | pTrc-ptrc- | 883 |
| | *A | | (NcoI/PstI)/ | fabF-amp | |
| | | | E. coli K12 | | |
| | | | genome | | |
| mcr | pACYC177 | E4151S | PCRn (blunt)/ | pACYC177- | 884 |
| | kan | | pTRC-ptrc mcr- | kan-ptrc- | |
| | *B | | amp | mcr | |
| mcr/accABCD | pACYC177 | E4151S | RE/(SwaI, XbaI: | pACYC177- | 885 |
| | kan | | pACYC 177 kan | kan-ptrc- | |
| | *B | | ptrc-mcr), (PmeI, | mcr-PtpiA- | |
| | | | XbaI: pJ251-cat- | accAD- | |
| | | | PtpiA-accAD- | PrpiA-accBC | |
| | | | PrpiA-accBC | | |

*A: Invitrogen, Carlsbad, CA;
*B: New England Biolabs, Ipswich, MA;
*C: DNA 2.0, Menlo Park, CA

[0540] Part 5: Cloning of pACYC-cat-accABCD-P_{T5}-udhA.

[0541] The P_{talA} promoter driving expression of udhA in pACYC-cat-accABCD-udhA was replaced with the stronger T5 promoter. The genomic P_{T5}-udhA construct from strain BX_{—}00635—was amplified using primer AS1170 (udhA 300 bp upstream). See SEQ ID NO:886 for sequence of udhA). PCRn fragments of P_{T5}-udhA obtained above were digested with PmeI and NdeI (New England BioLabs, Ipswich, Mass.). Vector pACYC-cat-accABCD-Pₜₐₗ-udhA was similarly digested with Swat and NdeI (New England BioLabs). The two digested DNA fragments were ligated and transformed to create pACYC-cat-accABCD-P_{T5}-udhA (SEQ ID NO:887). Plasmid digests were used to confirm the correct sequence. This plasmid is incorporated into strains shown in Table 31.

[0542] Part 6: Strain Construction

[0543] Using constructs made by the above methods, strains shown in Table 31, given the indicated Strain Names, were produced providing the genotypes. This is not meant to be limiting, and other strains may be made using these methods and following the teachings provided in this application, including providing different genes and gene regions for tolerance, and/or 3-HP production and modifications to modulate the fatty acid synthase system. Further to the latter, such strains may be produced by chromosomal modifications and/or introduction of non-chromosomal introductions, such as plasmids.

[0544] As to the latter, according to the respective combinations indicated in Table 38 below, the plasmids described above were introduced into the respective strains. All plasmids were introduced at the same time via electroporation using standard methods. Transformed cells were grown on the appropriate media with antibiotic supplementation and colonies were selected based on their appropriate growth on the selective media.

TABLE 31

| Strain | |
|---|---|
| Name | Strain Genotype |
| BW25113 | F-, Δ(araD-araB)567, ΔlacZ4787(::rrnB-3), LAM-, |
| | rph-1, Δ(rhaD-rhaB)568, hsdR514 |
| BX_0591 | F-, Δ(araD-araB)567, ΔlacZ4787(::rrnB-3), LAM-, |
| | rph-1, Δ(rhaD-rhaB)568, hsdR514, ΔldhA::frt, |
| | ΔpfIB::frt, ΔmgsA::frt, ΔpoxB::frt, Δpta-ack::frt |
| BX_0595 | F-, Δ(araD-araB)567, ΔlacZ4787(::rrnB-3), LAM-, |
| | rph-1, Δ(rhaD-rhaB)568, hsdR514, ΔldhA::frt, |
| | ΔpfIB::frt, ΔmgsA::frt, ΔpoxB::frt, Δpta-ack::frt, |
| | fabl^{ts} (S241F)-zeoR |
| BX_0619 | F-, Δ(araD-araB)567, ΔlacZ4787(::rrnB-3), LAM-, |
| | rph-1, Δ(rhaD-rhaB)568, hsdR514, ΔldhA::frt, |
| | ΔpfIB::frt, ΔmgsA::frt, ΔpoxB::frt, Δpta-ack::frt, |
| | fablts (S241F)-zeoR, T5-pntAB-BSD |
| BX_0634 | F-, Δ(araD-araB)567, ΔlacZ4787(::rrnB-3), LAM-, |
| | rph-1, Δ(rhaD-rhaB)568, hsdR514, ΔldhA::frt, |
| | ΔpfIB::frt, ΔmgsA::frt, ΔpoxB::frt, Δpta-ack::frt, |
| | fabl^{ts} (S241F)-zeoR, T5-pntAB, T5-aceEF |
| BX_0635 | F-, Δ(araD-araB)567, ΔlacZ4787(::rrnB-3), LAM-, |
| | rph-1, Δ(rhaD-rhaB)568, hsdR51,4 ΔldhA::frt, |
| | ΔpfIB::frt, ΔmgsA::frt, ΔpoxB::frt, Δpta-ack::frt, |
| | fabl^{ts} (S241F)-zeoR, T5-pntAB, T5-aceEF, |
| | T5-udhA-BSD |
| BX_0636 | F-, Δ(araD-araB)567, ΔlacZ4787(::rrnB-3), LAM-, |
| | rph-1, A(rhaD-rhaB)568, hsdR514, ΔldhA::frt, |
| | ΔpfIB::frt, ΔmgsA::frt, ΔpoxB::frt, Δpta-ack::frt, |
| | fabl^{ts} (S241F)-zeoR, T5-aceEF |
| BX_0637 | F-, Δ(araD-araB)567, ΔlacZ4787(::rrnB-3), LAM-, |
| | rph-1, Δ(rhaD-rhaB)568, hsdR514, ΔldhA::frt, |
| | ΔpfIB::frt, ΔmgsA::frt, ΔpoxB::frt, Δpta-ack::frt, |
| | fabl^{ts} (S241F)-zeoR, T5-aceEF, T5-udhA-BSD |
| BX_0638 | F-, Δ(araD-araB)567, ΔlacZ4787(::rrnB-3), LAM-, |
| | rph-1, Δ(rhaD-rhaB)568, hsdR514, ΔldhA::frt, |
| | ΔpfIB::frt, ΔmgsA::frt, ΔpoxB::frt, Δpta-ack::frt, |
| | fabl^{ts} (S241F)-zeoR, T5-pntAB, |
| | T5-aceEF, ΔaldB::frt |
| BX_0639 | F-, Δ(araD-araB)567, ΔlacZ4787(::rrnB-3), LAM-, |
| | rph-1, Δ(rhaD-rhaB)568, hsdR514, ΔldhA::frt, |
| | ΔpfIB::frt, ΔmgsA::frt, ΔpoxB::frt, Δpta-ack::frt, |
| | fabl^{ts} (S241F)-zeoR, T5-pntAB, |
| | T5-aceEF, ΔtrpR::kan |
| BX_0651 | F-, Δ(araD-araB)567, ΔlacZ4787(::rrnB-3), LAM-, |
| | rph-1, Δ(rhaD-rhaB)568, hsdR514, fabl^{ts} |
| | (S241F)-zeoR |
| BX_0652 | F-, Δ(araD-araB)567, ΔlacZ4787(::rrnB-3), LAM-, |
| | rph-1, Δ(rhaD-rhaB)568, hsdR514, ΔldhA::frt, |
| | ΔpfIB::frt, ΔmgsA::frt, ΔpoxB::frt, Δpta-ack::frt, |
| | fabl^{ts} (S241F)-zeoR, T5-pntAB, T5-aceEF, |
| | T5-udhA, ΔarcA::kan |
| BX_0653 | F-, Δ(araD-araB)567, ΔlacZ4787(::rrnB-3), LAM-, |
| | rph-1, Δ(rhaD-rhaB)568, hsdR514, ΔldhA::frt, |
| | ΔpfIB::frt, ΔmgsA::frt, ΔpoxB::frt, Δpta-ack::frt, |
| | fabl^{ts} (S241F)-zeoR, T5-pntAB, T5-aceEF, |
| | T5-udhA, ΔpuuC::kan |
| BX_0654 | F-, Δ(araD-araB)567, ΔlacZ4787(::rrnB-3), LAM-, |
| | rph-1, Δ(rhaD-rhaB)568, hsdR514, ΔldhA::frt, |
| | ΔpfIB::frt, ΔmgsA::frt, ΔpoxB::frt, Δpta-ack::frt, |
| | fabl^{ts} (S241F)-zeoR, T5-pntAB, T5-aceEF, |
| | T5-udhA, ΔaldA::kan |

### Example 12B

### Preparing a Genetically Modified E. coli Host Cell Comprising Malonyl-CoA-Reductase (Mcr) in Combination with Other Genetic Modifications to Increase 3-HP Production Relative to a Control E. coli Cell (Prophetic)

[0545] Genetic modifications are made to introduce a vector comprising mmsB such as from Pseudomonas auruginos, which further is codon-optimized for E. coli. Vectors comprising galP and a native or mutated ppc also may be introduced by methods known to those skilled in the art (see, e.g., Sambrook and Russell, Molecular Cloning: A Laboratory Manual, Third Edition 2001 (volumes 1-3), Cold Spring Harbor Laboratory Press, Cold Spring Harbor, N.Y., “Sambrook and Russell, 2001”), additionally recognizing that mutations may be made by a method using the XL1-Red mutator strain, using appropriate materials following a manufacturer's instructions (Stratagene QuikChange Mutagenesis Kit, Stratagene, La Jolla, Calif. USA) and selected for or screened under standard protocols.

[0546] Also, genetic modifications are made to reduce or eliminate the enzymatic activities of E. coli genes as desired. These genetic modifications are achieved by using the RED/ET homologous recombination method with kits supplied by Gene Bridges (Gene Bridges GmbH, Dresden, Germany, www.genebridges.com) according to manufacturer's instructions.

[0547] Also, in some embodiments genetic modifications are made to increase the NADPH cellular pool. Non-limiting examples of some targets for genetic modification are provided herein. These are pgi (in a mutated form), pntAB, overexpressed, gapA:gapN substitution/replacement, and disrupting or modifying a soluble transhydrogenase such as sthA, and genetic modifications of one or more of zwf, gnd, and edd.

[0548] The so-genetically modified microorganism of any such engineered embodiment is evaluated and found to exhibit higher productivity of 3-HP compared with a control E. coli lacking said genetic modifications. Productivity is measured by standard metrics, such as volumetric productivity (grams of 3-HP/hour) under similar culture conditions.

### Example 12C

### Mutational Development of Selected Polynucleotides (Prophetic)

[0549] A selected gene sequence, such as a nucleic acid sequence that encodes for any of SEQ ID NOs:783-791, is subjected to a mutation development protocol, starting by constructing a mutant library of a native or previously evolved and/or codon-optimized polynucleotide by use of an error-inducing PCRn site-directed mutagenesis method.

[0550] A polynucleotide exhibiting enzymatic activity of the selected gene (which may be any disclosed herein, e.g., an aminotransferase or mmsB) is cloned into an appropriate expression system for E. coli. This sequence may be codon optimized Cloning of a codon-optimized polynucleotide and its adequate expression will be accomplished via gene synthesis supplied from a commercial supplier using standard techniques. The gene will be synthesized with an eight amino acid C-terminal tag to enable affinity based protein purification. Once obtained using standard methodology, the gene will be cloned into an expression system using standard techniques.

[0551] The plasmid containing the above-described polynucleotide will be mutated by standard methods resulting in a large library of mutants (>10⁶). The mutant sequences will be excised from these plasmids and again cloned into an expression vector, generating a final library of greater than 10⁶ clones for subsequent screening. These numbers ensure a greater than 99% probability that the library will contain a mutation in every amino acid encoded by sequence. It is acknowledged that each method of creating a mutational library has its own biases, including transformation into mutator strains of E. coli, error prone PCRn, and in addition more site directed muagenesis.

[0552] In some embodiments, various methods may be considered and possibly several explored in parallel. One such method is the use of the XL1-Red mutator strain, which is deficient in several repair mechanisms necessary for accurate DNA replication and generates mutations in plasmids at a rate 5,000 times that of the wild-type mutation rate, may be employed using appropriate materials following a manufacturer's instructions (See Stratagene QuikChange Mutagenesis Kit, Stratagene, La Jolla, Calif. USA). This technique or other techniques known to those skilled in the art, may be employed and then a population of such mutants, e.g., in a library, is evaluated, such as by a screening or selection method, to identify clones having a suitable or favorable mutation.

[0553] With the successful construction of a mutant library, it will be possible to screen this library for increased activity, such as increased malonyl-CoA reductase activity. The screening process will be designed to screen the entire library of greater than 10⁶ mutants. This is done by screening methods suited to the particular enzymatic reaction.

### Example 13

### Evaluation of 3-HP Production Using Strains of Example 12

[0554] 3-HP production by BX3_{—}0194 was demonstrated at 100-mL scale in SM3 (minimal salts) media. Cultures were started from freezer stocks by standard practice (Sambrook and Russell, 2001) into 50 mL of LB media plus 100 μg/mL ampicillin and grown to stationary phase overnight at 37° C. with rotation at 225 rpm. Five ml of this culture were transferred to 100 ml of SM3 media plus 40 g/L glucose, 100 μg/ml ampicillin, and 1 mM IPTG in triplicate 250-ml baffled flasks and incubated at 37° C., 225 rpm. To monitor cell growth and 3-HP production by these cultures, samples (2 ml) were withdrawn at designated time points for optical density measurements at 600 nm (OD₆₀₀, 1 cm pathlength) and pelleted by centrifugation at 12,000 rpm for 5 min and the supernatant collected for analysis of 3-HP production as described under “Analysis of cultures for 3-HP production” in the Common Methods section. Dry cell weight (DCW) is calculated as 0.33 times the measured OD₆₀₀ value, based on baseline DCW to OD₆₀₀ determinations. All data are the average of triplicate cultures. For comparison purposes, the specific productivity is calculated from the averaged data at the 24-h time point and expressed as g 3-HP produced per gDCW. Under these conditions, no 3HP is produced after 24 hours in a culture growing to an OD₆₀₀ that corresponds to approximately 1.0 g DCW. Production of 3-HP by strain BX3_{—}0194 in SM3 medium is shown in Table 32.

TABLE 32
Production of 3-HP by
BX3_0194 in SM3 medium

| Time | 3HP | |
|---|---|---|
| (hr) | (g/L) | OD₆₀₀ |
| 4 | 0 | 1.3 |
| 6 | 0 | 2.3 |
| 8 | 0 | 2.8 |
| 24 | 0 | 3.4 |

[0555] Production by strain BX3_{—}0194 in SM3 medium in the presence of 10 μg/ml cerulenin is shown in Table 33. In the presence of cerulenin, an inhibitor of the fatty acid synthase system, internal pools of the malonyl-CoA precursor are proposed to increase thus leading to increased production of 3-HP. As may be seen by comparison to the results without cerulenin (Table 32), substantially more 3-HP is produced at every time point. Under these conditions, the specific productivity after 24 hours is 1.3 g 3HP per gDCW.

TABLE 33
Production of 3-HP by BX3_0194
in SM3 medium and the presence
of 10 μg/ml cerulenin

| Time | 3HP | |
|---|---|---|
| (hr) | (g/L) | OD₆₀₀ |
| 4 | 0.003 | 1.3 |
| 6 | 0.14 | 2.6 |
| 8 | 0.43 | 3.1 |
| 24 | 1.43 | 3.3 |

[0556] 3-HP production by BX3_{—}0195 was demonstrated at 100-mL scale in SM3 (minimal salts) media. Cultures were started from freezer stocks by standard practice (Sambrook and Russell, 2001) into 50 mL of LB media plus 100 μg/mL ampicillin and grown to stationary phase overnight at 37° C. with rotation at 225 rpm. Five ml of this culture were transferred to 100 ml of SM3 media plus 40 g/L glucose, 100 μg/ml ampicillin, and 1 mM IPTG in triplicate 250-ml baffled flasks and incubated at 37° C., 225 rpm. To monitor cell growth and 3-HP production by these cultures, samples (2 ml) were withdrawn at designated time points for optical density measurements at 600 nm (OD₆₀₀, 1 cm pathlength) and pelleted by centrifugation at 12,000 rpm for 5 min and the supernatant collected for analysis of 3-HP production as described under “Analysis of cultures for 3-HP production” in the Common Methods section. Dry cell weight (DCW) is calculated as 0.33 times the measured OD₆₀₀ value, based on baseline DCW to OD₆₀₀ determinations. All data are the average of triplicate cultures. For comparison purposes, the specific productivity is calculated from the averaged data at the 24-h time point and expressed as g 3-HP produced per gDCW. Under these conditions, no 3HP is produced after 24 hours in a culture growing to and OD₆₀₀ that corresponds to approximately 1.65 g DCW. Production of 3-HP by strain BX3_{—}0195 in SM3 medium is shown in Table 34.

TABLE 34
Production of 3-HP by BX3_0195 in SM3 medium

| Time | 3HP | |
|---|---|---|
| (hr) | (g/L) | OD₆₀₀ |
| 4 | 0 | 0.92 |
| 6 | 0 | 1.35 |
| 8 | 0 | 2.36 |
| 24 | 0 | 5.00 |

[0557] Production by strain BX3_{—}0195 in SM3 medium in the presence of 10 μg/ml cerulenin is shown in Table 35. In the presence of cerulenin, an inhibitor of the fatty acid synthase system, internal pools of the malonyl-CoA precursor are proposed to increase thus leading to increased production of 3-HP. As may be seen by comparison to the results without cerulenin (Table 34), substantially more 3-HP is produced at every time point. Under these conditions, the specific productivity after 24 hours is 0.54 g 3HP per gDCW.

TABLE 35
Production of 3-HP by BX3_0195 in SM3 medium
and the presence of 10 μg/ml cerulenin

| Time | 3HP | |
|---|---|---|
| (hr) | (g/L) | OD₆₀₀ |
| 4 | 0.003 | 0.97 |
| 6 | 0.07 | 1.57 |
| 8 | 0.31 | 2.36 |
| 24 | 1.17 | 6.59 |

[0558] 3-HP production by BX3_{—}0206 was demonstrated at 100-mL scale in SM3 (minimal salts) media. Cultures were started from freezer stocks by standard practice (Sambrook and Russell, 2001) into 50 mL of LB media plus 35 μg/mL kanamycin and grown to stationary phase overnight at 37° C. with rotation at 225 rpm. Five ml of this culture were transferred to 100 ml of SM3 media plus 40 g/L glucose and 35 μg/ml kanamycin in triplicate 250-ml baffled flasks and incubated at 37° C., 225 rpm. To monitor cell growth and 3-HP production by these cultures, samples (2 ml) were withdrawn at designated time points for optical density measurements at 600 nm (OD₆₀₀, 1 cm pathlength) and pelleted by centrifugation at 12,000 rpm for 5 min and the supernatant collected for analysis of 3-HP production as described under “Analysis of cultures for 3-HP production” in the Common Methods section. Dry cell weight (DCW) is calculated as 0.33 times the measured OD₆₀₀ value, based on baseline DCW to OD₆₀₀ determinations. All data are the average of triplicate cultures. For comparison purposes, the specific productivity is calculated from the averaged data at the 24-h time point and expressed as g 3-HP produced per gDCW. Under these conditions, the specific productivity after 24 hours is 0.05 g 3HP per gDCW. Production of 3-HP by strain BX3_{—}0206 in SM3 medium is shown in Table 36.

TABLE 36
Production of 3-HP by BX3_0206 in SM3 medium

| Time | 3HP | |
|---|---|---|
| (hr) | (g/L) | OD₆₀₀ |
| 24 | 0.01 | 6.5 |

[0559] Production by strain BX3_{—}0206 in SM3 medium in the presence of 10 μg/ml cerulenin is shown in Table 37. In the presence of cerulenin, an inhibitor of the fatty acid synthase system internal pools of the malonyl-CoA precursor are proposed to increase thus leading to increased production of 3-HP. As may be seen by comparison to the results without cerulenin (Table 36), substantially more 3-HP is produced after 24 hours. Under these conditions, the specific productivity after 24 hours is 0.20 g 3HP per gDCW, an approximately 40-fold increase relative to the results without cerulenin.

TABLE 37
Production of 3-HP by BX3_0195 in SM3 medium and
the presence of 10 μg/ml cerulenin

| Time | 3HP | |
|---|---|---|
| (hr) | (g/L) | OD₆₀₀ |
| 24 | 0.43 | 6.4 |

### Example 13A

### Evaluation of Strains for 3-HP Production

[0560] 3-HP production in biocatalysts (strains) listed in the following table was demonstrated at 100-mL scale in SM3 (minimal salts) media. SM3 used is described under the Common Methods Section, but was supplemented with 200 mM MOPS. Cultures were started from LB plates containing antibiotics by standard practice (Sambrook and Russell, 2001) into 50 mL of TB media plus the appropriate antibiotic as indicated and grown to stationary phase overnight at 30° C. with rotation at 250 rpm. Five ml of this culture were transferred to 100 ml of SM3 media plus 30 g/L glucose, antibiotic, and 1 mM IPTG (identified as “yes” under the “Induced” column) in triplicate 250-ml baffled flasks and incubated at 30° C., 250 rpm. Flasks were shifted to 37° C., 250 rpm after 4 hours. To monitor cell growth and 3-HP production by these cultures, samples (2 ml) were withdrawn at 24 hours for optical density measurements at 600 nm (OD₆₀₀, 1 cm pathlength) and pelleted by centrifugation at 14000 rpm for 5 min and the supernatant collected for analysis of 3-HP production as described under “Analysis of cultures for 3-HP production” in the Common Methods section. 3-HP titer and standard deviation is expressed as g/L. Dry cell weight (DCW) is calculated as 0.33 times the measured OD₆₀₀ value, based on baseline DCW per OD₆₀₀ determinations. All data are the average of triplicate cultures. For comparison purposes, product to cell ratio is calculated from the averaged data over 24 hours and is expressed as g 3-HP produced per gDCW. The specific productivity is calculated from the cell/product ratio obtained over the 20 hours of production and expressed as g 3-HP produced per gDCW per hour.

TABLE 38

| | | | | Average | | 20 Hour | 24 Hour |
|---|---|---|---|---|---|---|---|
| Strain | Strain | | | 24 Hour | Standard | Specific | Product/Cell |
| Name | Host | Plasmids | Induced | Titer | Deviation | Productivity | Ratio |
| BX3_0274 | BW25113 | 1) pTrc-ptrc-mcr-kan | yes | <0.001 | 0.000 | <0.001 | <0.001 |
| BX3_0282 | BW25113 | 1) pTrc-ptrc-mcr-kan | yes | <0.001 | 0.000 | <0.001 | <0.001 |
| | | 2) pJ251-cat-PtpiA- | | | | | |
| | | accAD-PrpiA-accBC | | | | | |
| BX3_0283 | BW25113 | 1) pTrc-ptrc-mcr-kan | yes | <0.001 | 0.000 | <0.001 | <0.001 |
| | | 2) pACYC184-cat- | | | | | |
| | | PtalA-pntAB | | | | | |
| BX3_0275 | BW25113 | 1) pTrc-ptrc-mcr-kan | yes | <0.001 | 0.000 | <0.001 | <0.001 |
| | | 2) pACYC184-cat- | | | | | |
| | | PtpiA-accAD-PrpiA- | | | | | |
| | | accBC-ptalA-pntAB | | | | | |
| BX3_0284 | BW25113 | 1) pTrc-ptrc-mcr-kan | yes | <0.001 | 0.000 | <0.001 | <0.001 |
| | | 2) pACYC184-cat- | | | | | |
| | | PtpiA-accAD-PrpiA- | | | | | |
| | | accBC-ptalA-udhA | | | | | |
| BX3_0285 | BX_00591 | 1) pTrc-ptrc-mcr-kan | yes | <0.001 | 0.000 | <0.001 | <0.001 |
| BX3_0286 | BX_00591 | 1) pTrc-ptrc-mcr-kan | yes | <0.001 | 0.000 | <0.001 | <0.001 |
| | | 2) pJ251-cat-PtpiA- | | | | | |
| | | accAD-PrpiA-accBC | | | | | |
| BX3_0287 | BX_00591 | 1) pTrc-ptrc-mcr-kan | yes | <0.001 | 0.000 | <0.001 | <0.001 |
| | | 2) pACYC184-cat- | | | | | |
| | | PtalA-pntAB | | | | | |
| BX3_0288 | BX_00591 | 1) pTrc-ptrc-mcr-kan | yes | <0.001 | 0.000 | <0.001 | <0.001 |
| | | 2) pACYC184-cat- | | | | | |
| | | PtpiA-accAD-PrpiA- | | | | | |
| | | accBC-ptalA-pntAB | | | | | |
| BX3_0289 | BX_00591 | 1) pTrc-ptrc-mcr-kan | yes | <0.001 | 0.000 | <0.001 | <0.001 |
| | | 2) pACYC184-cat- | | | | | |
| | | PtpiA-accAD-PrpiA- | | | | | |
| | | accBC-ptalA-udhA | | | | | |
| BX3_0239 | BX_00595 | 1) pTrc-ptrc-mcr-kan | yes | 2.317 | 0.001 | 0.067 | 1.335 |
| BX3_0261 | BX_00595 | 1) pTrc-ptrc-mcr-kan | yes | 4.576 | 0.327 | 0.187 | 3.748 |
| | | 2) pJ251-cat-PtpiA- | | | | | |
| | | accAD-PrpiA-accBC | | | | | |
| BX3_0290 | BX_00595 | 1) pTrc-ptrc-mcr-kan | yes | 1.706 | 0.396 | 0.060 | 1.194 |
| | | 2) pACYC184-cat- | | | | | |
| | | PtalA-pntAB | | | | | |
| BX3_0240 | BX_00595 | 1) pTrc-ptrc-mcr-kan | yes | 5.878 | 0.684 | 0.228 | 4.563 |
| | | 2) pACYC184-cat- | | | | | |
| | | PtpiA-accAD-PrpiA- | | | | | |
| | | accBC-ptalA-pntAB | | | | | |
| BX3_0267 | BX_00595 | 1) pTrc-ptrc-mcr-kan, | yes | 3.440 | 0.205 | 0.160 | 2.912 |
| | | 2)pACYC184-cat- | | | | | |
| | | PtpiA-accAD-PrpiA- | | | | | |
| | | accBC-ptalA-udhA | | | | | |
| BX3_0253 | BX_00619 | 1) pTrc-ptrc-mcr-kan | yes | 1.327 | 0.575 | 0.034 | 0.670 |
| BX3_0254 | BX_00619 | 1) pTrc-ptrc-mcr-kan | yes | 3.131 | 0.058 | 0.136 | 2.711 |
| | | 2)pJ251-cat-PtpiA- | | | | | |
| | | accAD-PrpiA-accBC | | | | | |
| BX3_0263 | BX_00619 | 1) pTrc-ptrc-mcr-kan | yes | 2.376 | 0.717 | 0.060 | 1.200 |
| | | 2) pACYC184-cat- | | | | | |
| | | PtpiA-accAD-PrpiA- | | | | | |
| | | accBC-ptalA-pntAB | | | | | |
| BX3_0268 | BX_00619 | 1) pTrc-ptrc-mcr-kan | yes | 5.555 | 0.265 | 0.240 | 4.809 |
| | | 2) pACYC184-cat- | | | | | |
| | | PtpiA-accAD-PrpiA- | | | | | |
| | | accBC-ptalA-udhA | | | | | |
| BX3_0279 | BX_00637 | 1) pTrc-ptrc-mcr-kan | yes | 3.640 | 0.210 | 0.154 | 3.073 |
| | | 2) pJ251-cat-PtpiA- | | | | | |
| | | accAD-PrpiA-accBC | | | | | |
| BX3_0303 | BX_00637 | 1) pTrc-ptrc-mcr-kan | yes | 2.620 | 0.085 | 0.065 | 1.297 |
| | | 2) pACYC184-cat- | | | | | |
| | | PtalA-pntAB | | | | | |
| BX3_0281 | BX_00637 | 1) pTrc-ptrc-mcr-kan | yes | 4.700 | 0.271 | 0.209 | 4.177 |
| | | 2) pACYC184-cat- | | | | | |
| | | PtpiA-accAD-PrpiA- | | | | | |
| | | accBC-ptalA-pntAB | | | | | |
| BX3_0280 | BX_00637 | 1) pTrc-ptrc-mcr-kan | yes | 4.270 | 0.314 | 0.175 | 3.507 |
| | | 2) pACYC184-cat- | | | | | |
| | | PtpiA-accAD-PrpiA- | | | | | |
| | | accBC-ptalA-udhA | | | | | |
| BX3_0276 | BX_00635 | 1) pTrc-ptrc-mcr-kan | yes | 5.110 | 0.542 | 0.210 | 4.196 |
| | | 2) pJ251-cat-PtpiA- | | | | | |
| | | accAD-PrpiA-accBC | | | | | |
| BX3_0304 | BX_00635 | 1) pTrc-ptrc-mcr-kan | yes | 2.430 | 0.147 | 0.076 | 1.512 |
| | | 2) pACYC184-cat- | | | | | |
| | | PtalA-pntAB | | | | | |
| BX3_0278 | BX_00635 | 1) pTrc-ptrc-mcr-kan | yes | 0.790 | 0.015 | 0.034 | 0.672 |
| | | 2) pACYC184-cat- | | | | | |
| | | PtpiA-accAD-PrpiA- | | | | | |
| | | accBC-ptalA-pntAB | | | | | |
| BX3_0277 | BX_00635 | 1) pTrc-ptrc-mcr-kan | yes | 6.340 | 0.580 | 0.260 | 5.207 |
| | | 2) pACYC184-cat- | | | | | |
| | | PtpiA-accAD-PrpiA- | | | | | |
| | | accBC-ptalA-udhA | | | | | |
| BX3_0296 | BX_00636 | 1) pTrc-ptrc-mcr-kan | yes | 3.400 | 0.139 | 0.102 | 2.032 |
| BX3_0297 | BX_00636 | 1) pTrc-ptrc-mcr-kan | yes | 1.830 | 0.144 | 0.069 | 1.376 |
| | | 2) pJ251-cat-PtpiA- | | | | | |
| | | accAD-PrpiA-accBC | | | | | |
| BX3_0298 | BX_00636 | 1) pTrc-ptrc-mcr-kan | yes | 2.670 | 0.065 | 0.081 | 1.628 |
| | | 2) pACYC184-cat- | | | | | |
| | | PtalA-pntAB | | | | | |
| BX3_0299 | BX_00636 | 1) pTrc-ptrc-mcr-kan | yes | 3.200 | 0.418 | 0.121 | 2.412 |
| | | 2) pACYC184-cat- | | | | | |
| | | PtpiA-accAD-PrpiA- | | | | | |
| | | accBC-ptalA-pntAB | | | | | |
| BX3_0300 | BX_00636 | 1) pTrc-ptrc-mcr-kan | yes | 4.930 | 0.638 | 0.184 | 3.671 |
| | | 2) pACYC184-cat- | | | | | |
| | | PtpiA-accAD-PrpiA- | | | | | |
| | | accBC-ptalA-udhA | | | | | |
| BX3_0291 | BX_00634 | 1) pTrc-ptrc-mcr-kan | yes | 1.330 | 0.138 | 0.039 | 0.783 |
| BX3_0292 | BX_00634 | 1) pTrc-ptrc-mcr-kan | yes | 1.209 | 0.087 | 0.030 | 0.599 |
| | | 2) pJ251-cat-PtpiA- | | | | | |
| | | accAD-PrpiA-accBC | | | | | |
| BX3_0293 | BX_00634 | 1) pTrc-ptrc-mcr-kan | yes | 0.269 | 0.035 | 0.006 | 0.124 |
| | | 2) pACYC184-cat- | | | | | |
| | | PtalA-pntAB | | | | | |
| BX3_0294 | BX_00634 | 1) pTrc-ptrc-mcr-kan | yes | 1.588 | 0.136 | 0.046 | 0.927 |
| | | 2) pACYC184-cat- | | | | | |
| | | PtpiA-accAD-PrpiA- | | | | | |
| | | accBC-ptalA-pntAB | | | | | |
| BX3_0295 | BX_00634 | 1) pTrc-ptrc-mcr-kan | yes | 1.054 | 0.048 | 0.028 | 0.552 |
| | | 2) pACYC184-cat- | | | | | |
| | | PtpiA-accAD-PrpiA- | | | | | |
| | | accBC-ptalA-udhA | | | | | |
| BX3_0302 | BX_00637 | 1) pTrc-ptrc-mcr-kan | yes | 3.710 | 0.221 | 0.118 | 2.352 |
| BX3_0301 | BX_00635 | 1) pTrc-ptrc-mcr-kan | yes | 3.150 | 0.576 | 0.101 | 2.027 |
| BX3_0305 | BW25113 | 1) pTrc-ptrc-mcr-kan- | yes | 0.006 | 0.006 | 0.000 | 0.003 |
| | | cynTS | | | | | |
| | | 2) pACYC184-cat- | | | | | |
| | | PtpiA-accAD-PrpiA- | | | | | |
| | | accBC-ptalA-pntAB | | | | | |
| BX3_0306 | BX_00591 | 1) pTrc-ptrc-mcr-kan- | yes | 0.035 | 0.035 | 0.001 | 0.014 |
| | | cynTS | | | | | |
| | | 2) pACYC184-cat- | | | | | |
| | | PtpiA-accAD-PrpiA- | | | | | |
| | | accBC-ptalA-pntAB | | | | | |
| BX3_0258 | BX_00595 | 1) pTrc-ptrc-mcr-kan- | yes | 1.190 | 0.046 | 0.039 | 0.771 |
| | | cynTS | | | | | |
| | | 2) pACYC184-cat- | | | | | |
| | | PtpiA-accAD-PrpiA- | | | | | |
| | | accBC-ptalA-pntAB | | | | | |
| BX3_0308 | BX_00634 | 1) pTrc-ptrc-mcr-kan- | yes | 0.401 | 0.006 | 0.011 | 0.211 |
| | | cynTS | | | | | |
| | | 2) pACYC184-cat- | | | | | |
| | | PtpiA-accAD-PrpiA- | | | | | |
| | | accBC-ptalA-udhA | | | | | |
| BX3_0310 | BX_00637 | 1) pTrc-ptrc-mcr-kan- | yes | 1.450 | 0.072 | 0.045 | 0.897 |
| | | cynTS | | | | | |
| | | 2) pACYC184-cat- | | | | | |
| | | PtpiA-accAD-PrpiA- | | | | | |
| | | accBC-ptalA-udhA | | | | | |
| BX3_0309 | BX_00635 | 1) pTrc-ptrc-mcr-kan- | yes | 4.079 | 0.054 | 0.155 | 3.098 |
| | | cynTS | | | | | |
| | | 2) pACYC184-cat- | | | | | |
| | | PtpiA-accAD-PrpiA- | | | | | |
| | | accBC-ptalA-udhA | | | | | |
| BX3_0311 | BX_00638 | 1) pTrc-ptrc-mcr-kan | yes | 3.040 | 0.227 | 0.119 | 2.387 |
| | | 2) pACYC184-cat- | | | | | |
| | | PtpiA-accAD-PrpiA- | | | | | |
| | | accBC-ptalA-udhA | | | | | |
| BX3_0312 | BX_00639 | 1) pTrc-ptrc-mcr-amp | yes | 2.850 | 0.071 | 0.152 | 3.030 |
| | | 2) pACYC184-cat- | | | | | |
| | | PtpiA-accAD-PrpiA- | | | | | |
| | | accBC-ptalA-udhA | | | | | |
| BX3_0352 | BX_0651 | 1) pTrc-ptrc-mcr-kan | yes | <0.001 | 0.000 | <0.001 | NA |
| BX3_0353 | BX_0651 | 1) pTrc-ptrc-mcr-kan | yes | <0.001 | 0.000 | <0.001 | NA |
| | | 2) pJ251-cat-PtpiA- | | | | | |
| | | accAD-PrpiA-accBC | | | | | |
| BX3_0313 | BX_00635 | 1) pACYC177-kan- | no | 0.037 | 0.009 | 0.001 | 0.027 |
| | | ptrc-mcr | | | | | |
| BX3_0313 | BX_00635 | 1) pACYC177-kan- | yes | 0.031 | 0.009 | 0.001 | 0.023 |
| | | ptrc-mcr | | | | | |
| BX3_0335 | BX_00635 | 1) pACYC177-kan- | no | 0.037 | 0.021 | 0.001 | 0.020 |
| | | ptrc-mcr-PtpiA-accAD- | | | | | |
| | | PrpiA-accBC | | | | | |
| BX3_0335 | BX_00635 | 1) pACYC177-kan- | yes | 0.037 | 0.021 | 0.001 | 0.020 |
| | | ptrc-mcr-PtpiA-accAD- | | | | | |
| | | PrpiA-accBC | | | | | |
| BX3_0349 | BX_00591 | 1) pTrc-ptrc- (366- | yes | 0.057 | 0.006 | 0.001 | 0.025 |
| | | 1220)mcr-ptrc-ydfG- | | | | | |
| | | kan | | | | | |
| BX3_0350 | BX_00595 | 1) pTrc-ptrc- (366- | yes | 1.163 | 0.045 | 0.023 | 0.457 |
| | | 1220)mcr-ptrc-ydfG- | | | | | |
| | | kan | | | | | |
| BX3_0351 | BX_00635 | 1) pTrc-ptrc- (366- | yes | 0.658 | 0.060 | 0.020 | 0.390 |
| | | 1220)mcr-ptrc-ydfG- | | | | | |
| | | kan | | | | | |
| | | 2) pACYC184-cat- | | | | | |
| | | PtpiA-accAD-PrpiA- | | | | | |
| | | accBC-ptalA-udhA | | | | | |
| BX3_0358 | BX_00591 | 1) pTrc-ptrc-ydfG-ptrc- | yes | 0.040 | 0.000 | 0.001 | 0.015 |
| | | (496-1220)mcr-amp | | | | | |
| BX3_0360 | BX_00635 | 1) pTrc-ptrc-ydfG-ptrc- | yes | 4.027 | 0.185 | 0.138 | 2.761 |
| | | (496-1220)mcr-amp | | | | | |
| | | 2) pACYC184-cat- | | | | | |
| | | PtpiA-accAD-PrpiA- | | | | | |
| | | accBC-ptalA-udhA | | | | | |
| BX3_0314 | BX_00635 | 1) pTrc-ptrc-mcr-kan- | yes | 1.170 | 0.118 | 0.055 | 1.101 |
| | | PtpiA-serA | | | | | |
| | | 2) pACYC184-cat- | | | | | |
| | | PtpiA-accAD-PrpiA- | | | | | |
| | | accBC-ptalA-udhA | | | | | |
| BX3_0315 | BX_00591 | 1) pACYC177-kan- | no | 0.013 | 0.006 | 0.000 | 0.008 |
| | | ptrc-mcr | | | | | |
| BX3_0316 | BX_00595 | 1) pACYC177-kan- | no | 0.010 | 0.012 | 0.000 | 0.007 |
| | | ptrc-mcr | | | | | |
| BX3_0333 | BX_00591 | 1) pACYC177-kan- | no | 0.005 | 0.004 | 0.000 | 0.002 |
| | | ptrc-mcr-PtpiA-accAD- | | | | | |
| | | PrpiA-accBC | | | | | |
| BX3_0334 | BX_00595 | 1) pACYC177-kan- | no | 0.300 | 0.013 | 0.007 | 0.134 |
| | | ptrc-mcr-PtpiA-accAD- | | | | | |
| | | PrpiA-accBC | | | | | |
| BX3_0317 | BX_00591 | 1) pACYC177-kan- | no | <0.001 | 0.000 | <0.2 | <0.2 |
| | | ptrc-mcr | | | | | |
| | | 2) pTrc-ptrc-fabF-amp | | | | | |
| BX3_0317 | BX_00591 | 1) pACYC177-kan- | yes | 0.033 | 0.024 | 0.001 | 0.021 |
| | | ptrc-mcr | | | | | |
| | | 2) pTrc-ptrc-fabF-amp | | | | | |
| BX3_0338 | BX_00591 | 1) pACYC177-kan- | no | 0.010 | 0.005 | 0.000 | 0.004 |
| | | ptrc-mcr-PtpiA-accAD- | | | | | |
| | | PrpiA-accBC | | | | | |
| | | 2) pTrc-ptrc-fabF-amp | | | | | |
| BX3_0338 | BX_00591 | 1) pACYC177-kan- | yes | 1.580 | 0.142 | 0.006 | 0.116 |
| | | ptrc-mcr-PtpiA-accAD- | | | | | |
| | | PrpiA-accBC | | | | | |
| | | 2) pTrc-ptrc-fabF-amp | | | | | |
| BX3_0318 | BX_00595 | 1) pACYC177-kan- | no | 0.161 | 0.013 | 0.005 | 0.097 |
| | | ptrc-mcr | | | | | |
| | | 2) pTrc-ptrc-fabF-amp | | | | | |
| BX3_0318 | BX_00595 | 1) pACYC177-kan- | yes | 1.330 | 0.101 | 0.049 | 0.976 |
| | | ptrc-mcr | | | | | |
| | | 2) pTrc-ptrc-fabF-amp | | | | | |
| BX3_0339 | BX_00595 | 1) pACYC177-kan- | no | 0.083 | 0.015 | 0.007 | 0.149 |
| | | ptrc-mcr-PtpiA-accAD- | | | | | |
| | | PrpiA-accBC | | | | | |
| | | 2) pTrc-ptrc-fabF-amp | | | | | |
| BX3_0339 | BX_00595 | 1) pACYC177-kan- | yes | 0.010 | 0.009 | 0.000 | 0.007 |
| | | ptrc-mcr-PtpiA-accAD- | | | | | |
| | | PrpiA-accBC | | | | | |
| | | 2) pTrc-ptrc-fabF-amp | | | | | |
| BX3_0319 | BX_00635 | 1) pACYC177-kan- | no | 0.120 | 0.008 | 0.005 | 0.094 |
| | | ptrc-mcr | | | | | |
| | | 2) pTrc-ptrc-fabF-amp | | | | | |
| BX3_0319 | BX_00635 | 1) pACYC177-kan- | yes | 1.068 | 0.450 | 0.043 | 0.854 |
| | | ptrc-mcr | | | | | |
| | | 2) pTrc-ptrc-fabF-amp | | | | | |
| BX3_0341 | BX_00635 | 1) pACYC177-kan- | no | 0.327 | 0.021 | 0.009 | 0.171 |
| | | ptrc-mcr-PtpiA-accAD- | | | | | |
| | | PrpiA-accBC | | | | | |
| | | 2) pTrc-ptrc-fabF-amp | | | | | |
| BX3_0341 | BX_00635 | 1) pACYC177-kan- | yes | 0.140 | 0.017 | 0.015 | 0.293 |
| | | ptrc-mcr-PtpiA-accAD- | | | | | |
| | | PrpiA-accBC | | | | | |
| | | 2) pTrc-ptrc-fabF-amp | | | | | |
| BX3_0342 | BX_00635 | 1) pTrc-ptrc-mcr-kan | yes | 0.341 | 0.055 | 0.009 | 0.188 |
| | | 2) pACYC184-cat- | | | | | |
| | | PtpiA-accAD-PrpiA- | | | | | |
| | | accBC-T5-udhA | | | | | |
| BX3_0343 | BX_00635 | 1) pTrc-ptrc-mcr-kan- | yes | 1.927 | 0.047 | 0.077 | 1.536 |
| | | cynTS | | | | | |
| | | 2) pACYC184-cat- | | | | | |
| | | PtpiA-accAD-PrpiA- | | | | | |
| | | accBC-T5-udhA | | | | | |
| BX3_0344 | BX_00652 | 1) pTrc-ptrc-mcr-amp | yes | 1.562 | 0.280 | 0.040 | 0.797 |
| BX3_0345 | BX_00652 | 1) pTrc-ptrc-mcr-amp | yes | 5.195 | 0.229 | 0.184 | 3.678 |
| | | 2) pJ251-cat-PtpiA- | | | | | |
| | | accAD-PrpiA-accBC | | | | | |
| BX3_0346 | BX_00652 | 1) pTrc-ptrc-mcr-amp | yes | 1.781 | 0.132 | 0.056 | 1.119 |
| | | 2) pACYC184-cat- | | | | | |
| | | PtpiA-accAD-PrpiA- | | | | | |
| | | accBC-ptalA-udhA | | | | | |
| BX3_0347 | BX_00653 | 1) pTrc-ptrc-mcr-amp | yes | 1.370 | 0.307 | 0.049 | 0.977 |
| | | 2) pACYC184-cat- | | | | | |
| | | PtpiA-accAD-PrpiA- | | | | | |
| | | accBC-ptalA-udhA | | | | | |
| BX3_0348 | BX_00654 | 1) pTrc-ptrc-mcr-amp | yes | 1.387 | 0.184 | 0.049 | 0.982 |
| | | 2) pACYC184-cat- | | | | | |
| | | PtpiA-accAD-PrpiA- | | | | | |
| | | accBC-ptalA-udhA | | | | | |
| BX3_0324 | BX_00591 | 1) pTrc-ptrc-Ebmcr- | yes | 0.009 | 0.002 | 0.000 | 0.004 |
| | | amp | | | | | |
| BX3_0328 | BX_00595 | 1) pTrc-ptrc-Ebmcr- | yes | 0.011 | 0.005 | 0.000 | 0.006 |
| | | amp | | | | | |

### Example 13B

### Evaluation of BX3_{—}240 Strain with Carbonate Addition

[0561] 3-HP production in E. coli BX3_{—}240 (made by methods above) was evaluated at 100-mL scale in SM3 (minimal salts) media having added sodium carbonate. SM3 used is described under the Common Methods Section, to which was added 10 mM, 20 mM and 50 mM Na₂CO₃ as treatments. Cultures were started from LB plates containing antibiotics by standard practice (Sambrook and Russell, 2001) into 50 mL of TB media plus the appropriate antibiotics kan and cat and grown to stationary phase overnight at 30° C. with rotation at 250 rpm. Five ml of this culture were transferred to 100 ml of SM3 media plus 30 g/L glucose, antibiotic, the indicated sodium carbonate, 0.1% yeast extract and 1 mM IPTG in triplicate 250-ml baffled flasks and incubated at 30° C., 250 rpm. Flasks were shifted to 37° C., 250 rpm after 4 hours. To monitor cell growth and 3-HP production by these cultures, samples (2 ml) were withdrawn at 24, 48 and 60 hours for optical density measurements at 600 nm (OD600, 1 cm path length) and pelleted by centrifugation at 14000 rpm for 5 min and the supernatant collected for analysis of 3-HP production as described under “Analysis of cultures for 3-HP production” in the Common Methods section. 3-HP titer and standard deviation is expressed as g/L. Dry cell weight (DCW) is calculated as 0.33 times the measured OD600 value, based on baseline DCW per OD600 determinations. All data are the average of triplicate cultures. For comparison purposes, product to cell ratio is calculated from the averaged data over 60 hours and is expressed as g 3-HP produced per gDCW.

[0562] 3-HP titer were 0.32 (+/−0.03), 0.87 (+/−0.10), 2.24 (+/−0.03), 4.15 (+/−0.27), 6.24 (+/−0.51), 7.50 (+/−0.55) and 8.03 (+/−0.14) g/L at 9, 11, 15, 19, 24, 48 and 60 hr, respectively. Biomass concentrations were 0.54 (+/−0.02), 0.79 (+/−0.03), 1.03 (+/−0.06), 1.18 (+/−0.04), 1.20 (+/−0.12), 1.74 (+/−0.30) and 1.84 (+/−0.22) at 9, 11, 15, 19, 24, 48 and 60 hr, respectively. Maximum product to cell ratio was 4.6 g 3-HP/g DCW.

### Example 14

### General Example of Genetic Modification to a Host Cell (Prophetic and Non-Specific)

[0563] In addition to the above specific examples, this example is meant to describe a non-limiting approach to genetic modification of a selected microorganism to introduce a nucleic acid sequence of interest. Alternatives and variations are provided within this general example. The methods of this example are conducted to achieve a combination of desired genetic modifications in a selected microorganism species, such as a combination of genetic modifications as described in sections herein, and their functional equivalents, such as in other bacterial and other microorganism species.

[0564] A gene or other nucleic acid sequence segment of interest is identified in a particular species (such as E. coli as described herein) and a nucleic acid sequence comprising that gene or segment is obtained.

[0565] Based on the nucleic acid sequences at the ends of or adjacent the ends of the segment of interest, 5′ and 3′ nucleic acid primers are prepared. Each primer is designed to have a sufficient overlap section that hybridizes with such ends or adjacent regions. Such primers may include enzyme recognition sites for restriction digest of transposase insertion that could be used for subsequent vector incorporation or genomic insertion. These sites are typically designed to be outward of the hybridizing overlap sections. Numerous contract services are known that prepare primer sequences to order (e.g., Integrated DNA Technologies, Coralville, Iowa USA).

[0566] Once primers are designed and prepared, polymerase chain reaction (PCRn) is conducted to specifically amplify the desired segment of interest. This method results in multiple copies of the region of interest separated from the microorganism's genome. The microorganism's DNA, the primers, and a thermophilic polymerase are combined in a buffer solution with potassium and divalent cations (e.g., Mg or Mn) and with sufficient quantities of deoxynucleoside triphosphate molecules. This mixture is exposed to a standard regimen of temperature increases and decreases. However, temperatures, components, concentrations, and cycle times may vary according to the reaction according to length of the sequence to be copied, annealing temperature approximations and other factors known or readily learned through routine experimentation by one skilled in the art.

[0567] In an alternative embodiment the segment of interest may be synthesized, such as by a commercial vendor, and prepared via PCRn, rather than obtaining from a microorganism or other natural source of DNA.

[0568] The nucleic acid sequences then are purified and separated, such as on an agarose gel via electrophoresis. Optionally, once the region is purified it can be validated by standard DNA sequencing methodology and may be introduced into a vector. Any of a number of vectors may be used, which generally comprise markers known to those skilled in the art, and standard methodologies are routinely employed for such introduction. Commonly used vector systems are pSMART (Lucigen, Middleton, Wis.), pET E. coli EXPRESSION SYSTEM (Stratagene, La Jolla, Calif.), pSC-B StrataClone Vector (Stratagene, La Jolla, Calif.), pRANGER-BTB vectors (Lucigen, Middleton, Wis.), and TOPO vector (Invitrogen Corp, Carlsbad, Calif., USA). Similarly, the vector then is introduced into any of a number of host cells. Commonly used host cells are E. cloni 100 (Lucigen, Middleton, Wis.), E. cloni 10GF′ (Lucigen, Middleton, Wis.), StrataClone Competent cells (Stratagene, La Jolla, Calif.), E. coli BL21, E. coli BW25113, and E. coli K12 MG1655. Some of these vectors possess promoters, such as inducible promoters, adjacent the region into which the sequence of interest is inserted (such as into a multiple cloning site), while other vectors, such as pSMART vectors (Lucigen, Middleton, Wis.), are provided without promoters and with dephosphorylated blunt ends. The culturing of such plasmid-laden cells permits plasmid replication and thus replication of the segment of interest, which often corresponds to expression of the segment of interest.

[0569] Various vector systems comprise a selectable marker, such as an expressible gene encoding a protein needed for growth or survival under defined conditions. Common selectable markers contained on backbone vector sequences include genes that encode for one or more proteins required for antibiotic resistance as well as genes required to complement auxotrophic deficiencies or supply critical nutrients not present or available in a particular culture media. Vectors also comprise a replication system suitable for a host cell of interest.

[0570] The plasmids containing the segment of interest can then be isolated by routine methods and are available for introduction into other microorganism host cells of interest. Various methods of introduction are known in the art and can include vector introduction or genomic integration. In various alternative embodiments the DNA segment of interest may be separated from other plasmid DNA if the former will be introduced into a host cell of interest by means other than such plasmid.

[0571] While steps of the general prophetic example involve use of plasmids, other vectors known in the art may be used instead. These include cosmids, viruses (e.g., bacteriophage, animal viruses, plant viruses), and artificial chromosomes (e.g., yeast artificial chromosomes (YAC) and bacteria artificial chromosomes (BAC)).

[0572] Host cells into which the segment of interest is introduced may be evaluated for performance as to a particular enzymatic step, and/or tolerance or bio-production of a chemical compound of interest. Selections of better performing genetically modified host cells may be made, selecting for overall performance, tolerance, or production or accumulation of the chemical of interest.

[0573] It is noted that this procedure may incorporate a nucleic acid sequence for a single gene (or other nucleic acid sequence segment of interest), or multiple genes (under control of separate promoters or a single promoter), and the procedure may be repeated to create the desired heterologous nucleic acid sequences in expression vectors, which are then supplied to a selected microorganism so as to have, for example, a desired complement of enzymatic conversion step functionality for any of the herein-disclosed metabolic pathways. However, it is noted that although many approaches rely on expression via transcription of all or part of the sequence of interest, and then translation of the transcribed mRNA to yield a polypeptide such as an enzyme, certain sequences of interest may exert an effect by means other than such expression.

[0574] The specific laboratory methods used for these approaches are well-known in the art and may be found in various references known to those skilled in the art, such as Sambrook and Russell, Molecular Cloning: A Laboratory Manual, Third Edition 2001 (volumes 1-3), Cold Spring Harbor Laboratory Press, Cold Spring Harbor, N.Y. (hereinafter, Sambrook and Russell, 2001).

[0575] As an alternative to the above, other genetic modifications may also be practiced, such as a deletion of a nucleic acid sequence of the host cell's genome. One non-limiting method to achieve this is by use of Red/ET recombination, known to those of ordinary skill in the art and described in U.S. Pat. Nos. 6,355,412 and 6,509,156, issued to Stewart et al. and incorporated by reference herein for its teachings of this method. Material and kits for such method are available from Gene Bridges (Gene Bridges GmbH, Dresden, Germany, <<www.genebridges.com>>), and the method may proceed by following the manufacturer's instructions. Targeted deletion of genomic DNA may be practiced to alter a host cell's metabolism so as to reduce or eliminate production of undesired metabolic products. This may be used in combination with other genetic modifications such as described herein in this general example.

### Example 14A

### Utilization of Sucrose as the Feedstock for Production of 3-HP and Other Products (Partial Prophetic)

[0576] Common laboratory and industrial strains of E. coli, such as the strains described herein, are not capable of utilizing sucrose as the sole carbon source, although this property is found in a number of wild strains, including pathogenic E. coli strains. Sucrose, and sucrose-containing feedstocks such as molasses, are abundant and often used as feedstocks for the production by microbial fermentation of organic acids, amino acids, vitamins, and other products. Thus further derivatives of the 3-HP-producing strains that are capable of utilizing sucrose would expand the range of feedstocks that can be utilized to produce 3-HP.

[0577] Various sucrose uptake and metabolism systems are known in the art (for example, U.S. Pat. No. 6,960,455), incorporated by reference for such teachings. We describe the construction of E. coli strains that harbor the csc genes conferring the ability to utilize sucrose via a non-phosphotransferase system, wherein the csc genes constitute cscA, encoding a sucrose hydrolase, cscB, encoding a sucrose permease, cscK, encoding a fructokinase, and cscR, encoding a repressor. The sequences of these genes are annotated in the NCBI database as accession No. X81461 AF473544. To allow efficient expression utilizing codons that are highly abundant in E. coli genes, an operon containing cscB, cscK, and cscA was designed and synthesized using the services of a commercial synthetic DNA provider (DNA 2.0, Menlo Park, Calif.). The amino acid sequences of the genes are set forth as, respectively, cscB—SEQ. ID. No. 888; cscA—SEQ. ID. No. 889; csck—SEQ. ID. No. 890. The synthetic operon consisted of 60 base pairs of the region of the E. coli genome immediately 5′ (upstream) of the adhE gene, a consensus strong promoter to drive expression of the csc genes, the coding regions for cscB, cscK, and cscA with short intergenic regions containing ribosome binding sites but no promoters, and 60 bp immediately 3′ (downstream) of the adhE gene. The segments homologous to sequences flanking the adhE gene will be used to target insertion of the CSC operon genes into the E. coli chromosome, with the concomittent deletion of adhE. The nucleotide sequence of the entire synthetic construct is shown as SEQ. ID. No. 891. The synthetic CSC operon is constructed in plasmid pJ214 (DNA 2.0, Menlo Park, Calif.) that provides an origin of replication derived from plasmid p15A and a gene conferring resistance to ampicillin. This plasmid is denoted pSUCR. A suitable host cell, such as E. coli strain BX_{—}595, is transformed simultaneously with pSUCR and with plasmid pTrc_kan_mcr or other suitable plasmid, and transformed strains selected for on LB medium plates containing ampicillin and kanamycin. Transformants carrying both plasmids are grown and evaluated for 3-HP production in shake flasks as described in Example 13, except that the glucose in SM3 medium is replaced with an equal concentration of sucrose.

[0578] Genes that confer functions to enable utilization of sucrose by E. coli can also be obtained from the natural isolate pUR400 (Cowan, P. J., et al. J. Bacteriol. 173:7464-7470, 1991) which carries genes for the phosphoenolpyruvate-dependent carbohydrate uptake phosphotransferase system (PTS). These genes consist of scrA, encoding the enzyme II component of the PTS transport complex, scrB, encoding sucrose-6 phosphate hydrolase, scrK, encoding fructokinase, and scrY, encoding a porin. These genes may be isolated or synthesized as described above, incorporated on a plasmid, and transformed into a suitable host cell, such as E. coli strain BX_{—}595, simultaneously with plasmid pTrc_kan_mcr or other suitable plasmid, and transformed strains selected for on LB medium plates containing the appropriate antibiotics. Transformants carrying both plasmids are grown and evaluated for 3-HP production in shake flasks as described in Example 13, except that the glucose in SM3 medium is replaced with an equal concentration of sucrose.

### Example 14B

### Construction and Evaluation of Additional Strains (Prophetic)

[0579] Other strains are produced that comprise various combinations of the genetic elements (additions, deletions and modifications) described herein are evaluated for and used for 3-HP production, including commercial-scale production. The following table illustrates a number of these strains.

[0580] Additionally, a further deletion or other modification to reduce enzymatic activity, of multifunctional 2-keto-3-deoxygluconate 6-phosphate aldolase and 2-keto-4-hydroxyglutarate aldolase and oxaloacetate decarboxylase (eda in E. coli), may be provided to various strains. Further to the latter, in various embodiments combined with such reduction of enzymatic activity of multifunctional 2-keto-3-deoxygluconate 6-phosphate aldolase and 2-keto-4-hydroxyglutarate aldolase and oxaloacetate decarboxylase (eda in E. coli), further genetic modifications may be made to increase a glucose transporter (e.g. galP in E. coli) and/or to decrease activity of one or more of heat stable, histidyl phosphorylatable protein (of PTS) (ptsH (HPr) in E. coli), phosphoryl transfer protein (of PTS) (ptsI in E. coli), and the polypeptide chain of PTS (Crr in E. coli).

[0581] These strains are evaluated in either flasks, or fermentors, using the methods described above. Also, it is noted that after a given extent of evaluation of strains that comprise introduced plasmids, the genetic elements in the plasmids may be introduced into the microorganism genome, such as by methods described herein as well as other methods known to those skilled in the art.

TABLE 39

| Strain | Host | Plasmids |
|---|---|---|
| BX3P_001 | F-, Δ(araD-araB)567, ΔlacZ4787(::rrnB-3), | 1) ptrc-mcr |
| | LAM-, rph-1, Δ(rhaD-rhaB)568, hsdR514, | |
| | ΔldhA::frt, ΔpflB::frt, ΔmgsA::frt, ΔpoxB::frt, | |
| | Δpta-ack::frt, fabIts (S241F)-zeoR T5 aceEF, | |
| | T5-pntAB, T5-udhA, fabB-tS | |
| BX3P_002 | F-, Δ(araD-araB)567, ΔlacZ4787(::rrnB-3), | 1) ptrc-mcr, |
| | LAM-, rph-1, Δ(rhaD-rhaB)568, hsdR514, | 2) accABCD |
| | ΔldhA::frt, ΔpflB::frt, ΔmgsA::frt, ΔpoxB::frt, | |
| | Δpta-ack::frt, fabIts (S241F)-zeoR T5 aceEF, | |
| | T5-pntAB, T5-udhA, fabB-tS | |
| BX3P_003 | F-, Δ(araD-araB)567, ΔlacZ4787(::rrnB-3), | 1) ptrc-mcr, |
| | LAM-, rph-1, Δ(rhaD-rhaB)568, hsdR514, | 2) accABCD- |
| | ΔldhA::frt, ΔpflB::frt, ΔmgsA::frt, ΔpoxB::frt, | udhA |
| | Δpta-ack::frt, fabIts (S241F)-zeoR T5 aceEF, | |
| | T5-pntAB, T5-udhA, fabB-tS | |
| BX3P_004 | F-, Δ(araD-araB)567, ΔlacZ4787(::rrnB-3), | 1) ptrc-mcr |
| | LAM-, rph-1, Δ(rhaD-rhaB)568, hsdR514, | |
| | ΔldhA::frt, ΔpflB::frt, ΔmgsA::frt, ΔpoxB::frt, | |
| | Δpta-ack::frt, fabIts (S241F)-zeoR T5 aceEF, | |
| | T5-pntAB, T5-udhA, relA, spoT | |
| BX3P_005 | F-, Δ(araD-araB)567, ΔlacZ4787(::rrnB-3), | 1) ptrc-mcr, |
| | LAM-, rph-1, Δ(rhaD-rhaB)568, hsdR514, | 2) accABCD |
| | ΔldhA::frt, ΔpflB::frt, ΔmgsA::frt, ΔpoxB::frt, | |
| | Δpta-ack::frt, fabIts (S241F)-zeoR T5 aceEF, | |
| | T5-pntAB, T5-udhA, relA, spoT | |
| BX3P_006 | F-, Δ(araD-araB)567, ΔlacZ4787(::rrnB-3), | 1) ptrc-mcr, |
| | LAM-, rph-1, Δ(rhaD-rhaB)568, hsdR514, | 2) accABCD- |
| | ΔldhA::frt, ΔpflB::frt, ΔmgsA::frt, ΔpoxB::frt, | udhA |
| | Δpta-ack::frt, fabIts (S241F)-zeoR T5 aceEF, | |
| | T5-pntAB, T5-udhA, relA, spoT | |
| BX3P_007 | F-, Δ(araD-araB)567, ΔlacZ4787(::rrnB-3), | 1) ptrc-mcr |
| | LAM-, rph-1, Δ(rhaD-rhaB)568, hsdR514, | |
| | ΔldhA::frt, ΔpflB::frt, ΔmgsA::frt, ΔpoxB::frt, | |
| | Δpta-ack::frt, fabIts (S241F)-zeoR T5 aceEF, | |
| | del-arcA:kan | |
| BX3P_008 | F-, Δ(araD-araB)567, ΔlacZ4787(::rrnB-3), | 1) ptrc-mcr, |
| | LAM-, rph-1, Δ(rhaD-rhaB)568, hsdR514, | 2) accABCD |
| | ΔldhA::frt, ΔpflB::frt, ΔmgsA::frt, ΔpoxB::frt, | |
| | Δpta-ack::frt, fabIts (S241F)-zeoR T5 aceEF, | |
| | del-arcA:kan | |
| BX3P_009 | F-, Δ(araD-araB)567, ΔlacZ4787(::rrnB-3), | 1) ptrc-mcr, |
| | LAM-, rph-1, Δ(rhaD-rhaB)568, hsdR514, | 2) accABCD- |
| | ΔldhA::frt, ΔpflB::frt, ΔmgsA::frt, ΔpoxB::frt, | udhA |
| | Δpta-ack::frt, fabIts (S241F)-zeoR T5 aceEF, | |
| | del-arcA:kan | |
| BX3P_010 | F-, Δ(araD-araB)567, ΔlacZ4787(::rrnB-3), | 1) ptrc-mcr |
| | LAM-, rph-1, Δ(rhaD-rhaB)568, hsdR514, | |
| | ΔldhA::frt, ΔpflB::frt, ΔmgsA::frt, ΔpoxB::frt, | |
| | Δpta-ack::frt, fabIts (S241F)-zeoR T5 aceEF, | |
| | T5-pntAB, T5-udhA, del-aldA, del puuC, | |
| | del arcA, del aldB, spoT, relA, T5-cynTS | |
| BX3P_011 | F-, Δ(araD-araB)567, ΔlacZ4787(::rrnB-3), | 1) ptrc-mcr, |
| | LAM-, rph-1, Δ(rhaD-rhaB)568, hsdR514, | 2) accABCD- |
| | ΔldhA::frt, ΔpflB::frt, ΔmgsA::frt, ΔpoxB::frt, | |
| | Δpta-ack::frt, fabIts (S241F)-zeoR T5 aceEF, | |
| | T5-pntAB, T5-udhA, del-aldA, del puuC, | |
| | del arcA, del aldB, spoT, relA, T5-cynTS | |
| BX3P_012 | F-, Δ(araD-araB)567, ΔlacZ4787(::rrnB-3), | 1) ptrc-mcr, |
| | LAM-, rph-1, Δ(rhaD-rhaB)568, hsdR514, | 2) accABCD- |
| | ΔldhA::frt, ΔpflB::frt, ΔmgsA::frt, ΔpoxB::frt, | udhA |
| | Δpta-ack::frt, fabIts (S241F)-zeoR T5 aceEF, | |
| | T5-pntAB, T5-udhA, del-aldA, del puuC, | |
| | del arcA, del aldB, spoT, relA, T5-cynTS | |
| BX3P_013 | F-, Δ(araD-araB)567, ΔlacZ4787(::rrnB-3), | 1) ptrc-mcr |
| | LAM-, rph-1, Δ(rhaD-rhaB)568, hsdR514, | |
| | ΔldhA::frt, ΔpflB::frt, ΔmgsA::frt, ΔpoxB::frt, | |
| | Δpta-ack::frt, fabIts (S241F)-zeoR T5 aceEF, | |
| | T5-pntAB, T5-udhA, del-aldA, del puuC, | |
| | del arcA, del aldB, spoT, relA, T5-cynTS, | |
| | fabB-ts | |
| BX3P_014 | F-, Δ(araD-araB)567, ΔlacZ4787(::rrnB-3), | 1) ptrc-mcr, |
| | LAM-, rph-1, Δ(rhaD-rhaB)568, hsdR514, | 2) accABCD |
| | ΔldhA::frt, ΔpflB::frt, ΔmgsA::frt, ΔpoxB::frt, | |
| | Δpta-ack::frt, fabIts (S241F)-zeoR T5 aceEF, | |
| | T5-pntAB, T5-udhA, del-aldA, del puuC, | |
| | del arcA, del aldB, spoT, relA, T5-cynTS, | |
| | fabB-ts | |
| BX3P_015 | F-, Δ(araD-araB)567, ΔlacZ4787(::rrnB-3), | 1) ptrc-mcr, |
| | LAM-, rph-1, Δ(rhaD-rhaB)568, hsdR514, | 2) accABCD- |
| | ΔldhA::frt, ΔpflB::frt, ΔmgsA::frt, ΔpoxB::frt, | udhA |
| | Δpta-ack::frt, fabIts (S241F)-zeoR T5 aceEF, | |
| | T5-pntAB, T5-udhA, del-aldA, del puuC, | |
| | del arcA, del aldB, spoT, relA, T5-cynTS, | |
| | fabB-ts | |
| BX3P_016 | F-, Δ(araD-araB)567, ΔlacZ4787(::rrnB-3), | 1) ptrc-mcr |
| | LAM-, rph-1, Δ(rhaD-rhaB)568, hsdR514, | |
| | ΔldhA::frt, ΔpflB::frt, ΔmgsA::frt, ΔpoxB::frt, | |
| | Δpta-ack::frt, fabIts (S241F)-zeoR T5 aceEF, | |
| | T5-pntAB, T5-udhA, T5-cynTS | |
| BX3P_017 | F-, Δ(araD-araB)567, ΔlacZ4787(::rrnB-3), | 1) ptrc-mcr, |
| | LAM-, rph-1, Δ(rhaD-rhaB)568, hsdR514, | 2) accABCD |
| | ΔldhA::frt, ΔpflB::frt, ΔmgsA::frt, ΔpoxB::frt, | |
| | Δpta-ack::frt, fabIts (S241F)-zeoR T5 aceEF, | |
| | T5-pntAB, T5-udhA, T5-cynTS | |
| BX3P_018 | F-, Δ(araD-araB)567, ΔlacZ4787(::rrnB-3), | 1) ptrc-mcr, |
| | LAM-, rph-1, Δ(rhaD-rhaB)568, hsdR514, | 2) accABCD- |
| | ΔldhA::frt, ΔpflB::frt, ΔmgsA::frt, ΔpoxB::frt, | udhA |
| | Δpta-ack::frt, fabIts (S241F)-zeoR T5 aceEF, | |
| | T5-pntAB, T5-udhA, T5-cynTS | |
| BX3P_019 | F-, Δ(araD-araB)567, ΔlacZ4787(::rrnB-3), | 1) ptrc-mcr |
| | LAM-, rph-1, Δ(rhaD-rhaB)568, hsdR514, | |
| | ΔldhA::frt, ΔpflB::frt, ΔmgsA::frt, ΔpoxB::frt, | |
| | Δpta-ack::frt, fabIts (S241F)-zeoR T5 aceEF, | |
| | T5-pntAB, T5-udhA, del-aldA, del puuC, | |
| | del arcA, del aldB, spoT, relA, T5-cynTS | |
| BX3P_020 | F-, Δ(araD-araB)567, ΔlacZ4787(::rrnB-3), | 1) ptrc-mcr, |
| | LAM-, rph-1, Δ(rhaD-rhaB)568, hsdR514, | 2) accABCD |
| | ΔldhA::frt, ΔpflB::frt, ΔmgsA::frt, ΔpoxB::frt, | |
| | Δpta-ack::frt, fabIts (S241F)-zeoR T5 aceEF, | |
| | T5-pntAB, T5-udhA, del-aldA, del puuC, | |
| | del arcA, del aldB, spoT, relA, T5-cynTS | |
| BX3P_021 | F-, Δ(araD-araB)567, ΔlacZ4787(::rrnB-3), | 1) ptrc-mcr, |
| | LAM-, rph-1, Δ(rhaD-rhaB)568, hsdR514, | 2) accABCD- |
| | ΔldhA::frt, ΔpflB::frt, ΔmgsA::frt, ΔpoxB::frt, | udhA |
| | Δpta-ack::frt, fabIts (S241F)-zeoR T5 aceEF, | |
| | T5-pntAB, T5-udhA, del-aldA, del puuC, | |
| | del arcA, del aldB, spoT, relA, T5-cynTS | |
| BX3P_022 | F-, Δ(araD-araB)567, ΔlacZ4787(::rrnB-3), | 1) ptrc-mcr |
| | LAM-, rph-1, Δ(rhaD-rhaB)568, hsdR514, | |
| | ΔldhA::frt, ΔpflB::frt, ΔmgsA::frt, ΔpoxB::frt, | |
| | Δpta-ack::frt, fabIts (S241F)-zeoR T5 aceEF, | |
| | T5-pntAB, T5-udhA, del-aldA, del puuC, | |
| | del arcA, del aldB, spoT, relA, T5-cynTS, | |
| | fabB-ts | |
| BX3P_023 | F-, Δ(araD-araB)567, ΔlacZ4787(::rrnB-3), | 1) ptrc-mcr, |
| | LAM-, rph-1, Δ(rhaD-rhaB)568, hsdR514, | 2) accABCD |
| | ΔldhA::frt, ΔpflB::frt, ΔmgsA::frt, ΔpoxB::frt, | |
| | Δpta-ack::frt, fabIts (S241F)-zeoR T5 aceEF, | |
| | T5-pntAB, T5-udhA, del-aldA, del puuC, | |
| | del arcA, del aldB, spoT, relA, T5-cynTS, | |
| | fabB-ts | |
| BX3P_024 | F-, Δ(araD-araB)567, ΔlacZ4787(::rrnB-3), | 1) ptrc-mcr, |
| | LAM-, rph-1, Δ(rhaD-rhaB)568, hsdR514, | 2) accABCD- |
| | ΔldhA::frt, ΔpflB::frt, ΔmgsA::frt, ΔpoxB::frt, | udhA |
| | Δpta-ack::frt, fabIts (S241F)-zeoR T5 aceEF, | |
| | T5-pntAB, T5-udhA, del-aldA, del puuC, | |
| | del arcA, del aldB, spoT, relA, T5-cynTS, | |
| | fabB-ts | |
| BX3P_025 | F-, Δ(araD-araB)567, ΔlacZ4787(::rrnB-3), | 1) pACYC- |
| | LAM-, rph-1, Δ(rhaD-rhaB)568, hsdR514, | mcr- |
| | ΔldhA::frt, ΔpflB::frt, ΔmgsA::frt, ΔpoxB::frt, | accABCD, |
| | Δpta-ack::frt, fabIts (S241F)-zeoR, T5-pntAB, | 2) pKK223- |
| | T5 aceEF, T5-udhA-BSD | metE C645A |
| BX3P_026 | F-, Δ(araD-araB)567, ΔlacZ4787(::rrnB-3), | 1) pACYC |
| | LAM-, rph-1, Δ(rhaD-rhaB)568, hsdR514, | mcr- |
| | ΔldhA::frt, ΔpflB::frt, ΔmgsA::frt, ΔpoxB::frt, | accABCD, |
| | Δpta-ack::frt, fabIts (S241F)-zeoR, T5-pntAB, | 2) pKK223-ct |
| | T5 aceEF, T5-udhA-BSD | his-thrA |
| BX3P_027 | F-, Δ(araD-araB)567, ΔlacZ4787(::rrnB-3), | 1) pACYC- |
| | LAM-, rph-1, Δ(rhaD-rhaB)568, hsdR514, | mcr- |
| | ΔldhA::frt, ΔpflB::frt, ΔmgsA::frt, ΔpoxB::frt, | accABCD, |
| | Δpta-ack::frt, fabIts (S241F)-zeoR, T5-pntAB, | 2) pKK223- |
| | T5 aceEF, T5-udhA-BSD | aroH*457 |
| BX3P_028 | F-, Δ(araD-araB)567, ΔlacZ4787(::rrnB-3), | 1) pACYC- |
| | LAM-, rph-1, Δ(rhaD-rhaB)568, hsdR514, | mcr- |
| | ΔldhA::frt, ΔpflB::frt, ΔmgsA::frt, ΔpoxB::frt, | accABCD, |
| | Δpta-ack::frt, fabIts (S241F)-zeoR, T5-pntAB, | 2) psmart- |
| | T5 aceEF, T5-udhA-BSD | hcamp-cadA |
| BX3P_029 | F-, Δ(araD-araB)567, ΔlacZ4787(::rrnB-3), | 1) pACYC- |
| | LAM-, rph-1, Δ(rhaD-rhaB)568, hsdR514, | mcr- |
| | ΔldhA::frt, ΔpflB::frt, ΔmgsA::frt, ΔpoxB::frt, | accABCD, |
| | Δpta-ack::frt, fabIts (S241F)-zeoR, T5-pntAB, | 2) psmart- |
| | T5 aceEF, T5-udhA-BSD | hcamp-metC |
| BX3P_030 | F-, Δ(araD-araB)567, ΔlacZ4787(::rrnB-3), | 1) pACYC- |
| | LAM-, rph-1, Δ(rhaD-rhaB)568, hsdR514, | mcr- |
| | ΔldhA::frt, ΔpflB::frt, ΔmgsA::frt, ΔpoxB::frt, | accABCD, |
| | Δpta-ack::frt, fabIts (S241F)-zeoR, T5-pntAB, | 2) psmart- |
| | T5 aceEF, T5-udhA-BSD | hcamp- |
| | | nrdAB |
| BX3P_031 | F-, Δ(araD-araB)567, ΔlacZ4787(::rrnB-3), | 1) pACYC- |
| | LAM-, rph-1, Δ(rhaD-rhaB)568, hsdR514, | mcr- |
| | ΔldhA::frt, ΔpflB::frt, ΔmgsA::frt, ΔpoxB::frt, | accABCD, |
| | Δpta-ack::frt, fabIts (S241F)-zeoR, T5-pntAB, | 2) psmart- |
| | T5 aceEF, T5-udhA-BSD | hcamp-prs |

### Example 15

### Prophetic Example of 3-HP Production

[0582] An inoculum of a genetically modified microorganism that possesses a 3-HP production pathway and other genetic modifications as described above is provided to a culture vessel to which also is provided a liquid media comprising nutrients at concentrations sufficient for a desired bio-process culture period.

[0583] The final broth (comprising microorganism cells, largely ‘spent’ media and 3-HP, the latter at concentrations, in various embodiments, exceeding 1, 2, 5, 10, 30, 50, 75 or 100 grams/liter) is collected and subjected to separation and purification steps so that 3-HP is obtained in a relatively purified state. Separation and purification steps may proceed by any of a number of approaches combining various methodologies, which may include centrifugation, concentration, filtration, reduced pressure evaporation, liquid/liquid phase separation (including after forming a polyamine-3-HP complex, such as with a tertiary amine such as CAS#68814-95-9, Alamine® 336, a triC8-10 alkyl amine (Cognis, Cincinnati, Ohio or Henkel Corp.), membranes, distillation, and/or other methodologies recited in this patent application, incorporated herein. Principles and details of standard separation and purification steps are known in the art, for example in “Bioseparations Science and Engineering,” Roger G. Harrison et al., Oxford University Press (2003), and Membrane Separations in the Recovery of Biofuels and Biochemicals—An Update Review, Stephen A. Leeper, pp. 99-194, in Separation and Purification Technology, Norman N. Li and Joseph M. Calo, Eds., Marcel Dekker (1992), incorporated herein for such teachings. The particular combination of methodologies is selected from those described herein, and in part is based on the concentration of 3-HP and other components in the final broth.

### Example 16

### Prophetic Example of Conversion of 3-HP to Specified Downstream Chemicals

[0584] 3-HP such as from Example 13 is converted to any one or more of propriolactone via a ring-forming internal esterification reaction (eliminating a water molecule), ethyl-3-HP via esterification with ethanol, malonic acid via an oxidation reaction, and 1,3-propanediol via a reduction reaction.

[0585] These conversions proceed such as by organic synthesis reactions known to those skilled in the art. Any of these conversions of 3-HP may proceed via a chemical synthesis reaction under controlled conditions to attain a high conversion rate and yield with acceptably low by-product formation.

### Example 17

### Prophetic Example of Bio-Acrylic Acid Production from 3-HP

[0586] 3-HP is obtained in a relatively pure state from a microbial bio-production event, such as is described in Example 15. The 3-HP is converted to acrylic acid by a dehydration reaction, such as by heating under vacuum in the presence of a catalyst. More particularly, an aqueous solution of 3-HP as an acid or salt is added to a rotatable flask with a catalyst selected from Table 8, incorporated into this example from Section XI above.

[0587] The temperature is raised to between 100 and 190° C. while under rotation and vacuum, with vapors collected at a condenser. Acrylic acid is collected as condensate and quantified such as by analytic procedures described herein. Various combinations of parameters, such as temperature, rate of change of temperature, purity of 3-HP solution derived from the microbial bio-production event, reduced pressure (and rate of change of pressure), and type and concentration of one or more catalysts, are evaluated with objectives of high conversion rate without undesired side reactions, which might, in some production scenarios, include undesired polymerization of acrylic acid.

### Example 18

### Alternative Prophetic Example of Bio-Acrylic Acid Production from 3-HP

[0588] 3-HP is obtained in a relatively pure state from a microbial bio-production event, such as is described in Example 15. The 3-HP is converted to acrylic acid by a dehydration reaction, such as by heating under vacuum in the presence of a catalyst, however under conditions favoring a controlled polymerization of acrylic acid after its formation from 3-HP. Various combinations of parameters, such as temperature, rate of change of temperature, including removal of heat generated during reaction, purity of 3-HP solution derived from the microbial bio-production event, reduced pressure (and rate of change of pressure), and type and concentration of one or more catalysts and/or exposure to light, are evaluated with objectives of high conversion rate without undesired side reactions. Acrylic acid so formed may be separated and purified by methods known in the art, such as those methods disclosed, supra.

### Example 19

### Prophetic Example of Conversions of Acrylic Acid to Downstream Products

[0589] The acrylic acid of Example 17 is further converted to one (or more) of the downstream products as described herein. For example, the conversion method is esterification with methanol to produce methyl acrylate, or other esterifications with other alcohols for other acrylate esters, amidation to produce acrylamide, adding a nitrile moiety to produce acrylonitrile. Other additions are made as desired to obtain substituted downstream compounds as described herein.

### Example 20

### Prophetic Example of Conversion of Acrylic Acid to Polyacrylic Acid

[0590] The acrylic acid of Example 17 is further converted to a polyacrylic acid by heating the acrylic acid in an aqueous solution and initiating a polymerization reaction by exposing the solution to light, and thereafter controlling the temperature and reaction rate by removing heat of the polymerization.

[0591] The specific methods and teachings of the specification, and/or cited references that are incorporated by reference, may be incorporated into the above examples. Also, production of 3-HP, or one of its downstream products such as described herein, may reach at least 1, at least 2, at least 5, at least 10, at least 20, at least 30, at least 40, and at least 50 g/liter titer in various embodiments.

### Example 21

### Separation and Reactive Extraction of 3-HP from Fermentation Broth

[0592] A fermentation broth obtained from a 10-liter fermentor at the conclusion of a fermentation experiment was heated to 60° C. for one hour as a microorganism kill step, then adjusted to approximately 100 grams per liter of 3-HP (produced by the method described in Common Methods Section, Subsection IIIa), and pH-adjusted to approximately 7.0 with ammonium sulfate. Calcium chloride at 1 M was added as a flocculent to reach a final concentration of about 8.2 g/L. Thereafter the pH was adjusted to a pH of approximately 2.0 using sulfuric acid. Thereafter a volume of this modified fermentation broth was centrifuged at approximately 3,200 g for 5 minutes to yield a clarified broth and a pellet, which was discarded.

[0593] Portions of the clarified broth were then subjected to reactive extraction by mixing with a tertiary amine non-polar phase comprising various co-solvents. After mixing, aqueous and amine non-polar phases were allowed to separate, and the amine non-polar phase was removed from the aqueous phase, which was subjected to analysis for 3-HP concentration by HPLC (see method in Common Methods Section). Amines included Alamine 336, described above, and tripentylamine. Table 40 provides a summary of the single pass extraction efficiency into the respective amine non-polar phase solutions, each respectively calculated based on the difference between the starting 3-HP in the portion and the 3-HP in the raffinate (aqueous phase after extraction).

TABLE 40

| | | | Tripentylamine with indicated co-solvent: | | | |
|---|---|---|---|---|---|---|
| | | | | | Methyl | |
| | | Alamine 336 | | | ethyl | Methyl tert- |
| | | Butanol | Butanol | p-Xylene | ketone | butyl ether |
| — | | 1 | 2 | 3 | 4 | 5 |
| start mass | G | 10.56 | 21.18 | 21.19 | 21.15 | 21.10 |
| Density | g/mL | 1.06 | 1.06 | 1.06 | 1.06 | 1.06 |
| 3-HP concentration start | g/L | 96.85 | 96.85 | 96.85 | 96.85 | 96.85 |
| 3-HP mass start | G | 0.97 | 1.94 | 1.94 | 1.94 | 1.94 |
| mass cosolvent added | G | 8.53 | 10.18 | 10.85 | 10.13 | 9.27 |
| cosolvent density | g/mL | 0.80 | 0.80 | 0.85 | 0.79 | 0.72 |
| mass amine added | G | 8.51 | 9.90 | 9.93 | 9.90 | 9.82 |
| amine density | g/mL | 0.80 | 0.77 | 0.78 | 0.77 | 0.77 |
| mass total extractant | G | 17.04 | 20.08 | 20.78 | 20.03 | 19.09 |
| raffinate collected | G | 7.64 | 15.92 | 20.04 | 12.66 | 19.32 |
| raffinate density | g/mL | 1.08 | 1.07 | 1.07 | 1.06 | 1.08 |
| 3-HP concentration | g/L | 53.94 | 54.17 | 78.69 | 52.75 | 67.64 |
| raffinate | | | | | | |
| 3-HP mass raffinate | G | 0.38 | 0.81 | 1.47 | 0.63 | 1.21 |
| % 3-HP raffinate | % | 0.39 | 0.42 | 0.76 | 0.33 | 0.62 |
| extractant collected | G | 19.22 | 24.40 | 21.26 | 28.13 | 20.07 |
| 3-HP mass extractant | G | 0.59 | 1.13 | 0.46 | 1.31 | 0.73 |
| % 3-HP extracted | % | 0.61 | 0.58 | 0.24 | 0.67 | 0.38 |
| Total | | | | | | |
| Total 3HP extracted | G | 0.59 | 1.13 | 0.46 | 1.31 | 0.73 |
| % 3HP extracted | % | 60.60 | 58.39 | 23.91 | 67.47 | 37.53 |

[0594] It was noted that there was substantially more emulsion formation with the Alamine 336, and the phase separation was slower, than with the tripentylamine treatments. Nonetheless, both of these tertiary amines demonstrated that 3-HP would extract from the aqueous phase into the non-polar phase (i.e., the tertiary amine with co-solvents). The co-solvents used in this example are not meant to be limiting; other co-solvents may be considered, e.g., pentanol, hexanol, heptanol, octanol, nonanol, decanol. Also, it is noted that hexane was tested as a co-solvent with tripentylamine but the data was not considered valid as this sample caused a peak shift in the HPLC analysis.

[0595] Further, as described elsewhere in this application and as generally known in the art, there are other approaches to separation, extraction, and purification of 3-HP from a fermentation broth. Accordingly, this example is not meant to be limiting.

[0596] An example of recovery of the 3-HP from the non-polar phase tertiary amine solution by back-extraction is provided in Example 22.

### Example 22

### 3-HP Dehydration to Acrylic Acid with Acid Catalyst

[0597] Approximately 15 mL of an aqueous solution comprising about 350 grams of 3-HP per liter (produced by the method described in Common Methods Section, Subsection IIIa) was combined in a flask with approximately 15 mL of concentrated sulfuric acid. The flask was attached to a rotary evaporator apparatus (Rotovapor Model R-210, BUCHI Labortechnik AG, Switzerland), heated in a heating bath (BUCCHI, Model B-491) to 80° C. under reduced pressure (10 to 20 mbar), and the condensate was collected below a condensing apparatus operated with chilled water as the coolant. After approximately 5 hours the condensate was collected, its volume measured, and an aliquot submitted for HPLC analysis (see Common Methods Section). An aliquot of the reaction mixture in the flask also was submitted for HPLC analysis. The HPLC analysis indicated that approximately 24 grams per liter of acrylic acid was obtained in the condensate, whereas approximately 4.5 grams per liter remained in the reaction mixture of the flask. Thus, 3-HP was shown to form acrylic acid under these conditions. This example is not meant to be limiting.

### Example 23

### Prophetic Example of Conversion of Acrylic Acid to Polyacrylic Acid

[0598] Acrylic acid, such as that provided in Example 22, is further converted to a polyacrylic acid by heating the acrylic acid in an aqueous solution and initiating a free-radical polymerization reaction by exposing the solution to light, and thereafter controlling the temperature and reaction rate by removing heat of the polymerization.

[0599] Batch polymerization is utilized, wherein acrylic acid is dissolved in water at a concentration of about 50 wt %. The monomer solution is deoxygenated by bubbling nitrogen through the solution. A free-radical initiator, such as an organic peroxide, is optionally added (to assist the initiation via the light source) and the temperature is brought to about 60° C. to start polymerization.

[0600] The molecular mass and molecular mass distribution of the polymer are measured. Optionally, other polymer properties including density, viscosity, melting temperature, and glass-transition temperature are determined.

The specific methods and teachings of the specification, and/or cited references that are incorporated by reference, may be incorporated into the above examples. Also, production of 3-HP, or one of its downstream products such as described herein, may reach at least 1, at least 2, at least 5, at least 10, at least 20, at least 30, at least 40, and at least 50 g/liter titer in various embodiments.

### Example 24

### Prophetic Example of Bulk Polymerization of Acrylic Acid to Polyacrylic Acid

[0601] Acrylic acid, such as that provided in Example 22, is further converted to a polyacrylic acid by bulk polymerization. Acrylic acid monomer, monomer-soluble initiators, and neutralizing base are combined in a polymerization reactor. Polymerization is initiated, and temperature is controlled to attain a desired conversion level. Initiators are well-known in the art and include a range of organic peroxides and other compounds, such as discussed above. The acrylic acid or polyacrylic acid is at least partially neutralized with a base such as sodium hydroxide.

[0602] The molecular mass and molecular mass distribution of the polymer are measured. Optionally, other polymer properties including density, viscosity, melting temperature, and glass-transition temperature are determined.

[0603] The polyacrylic acid produced is intended for use as a superabsorbent polymer, as an absorbent for water and aqueous solutions for diapers, adult incontinence products, feminine hygiene products, and similar consumer products, as well as for possible uses in agriculture, horticulture, and other fields.

### Example 25

### Prophetic Example of Production of a Superabsorbent Polymer

[0604] Acrylic acid, such as that provided in Example 22, is further converted to a superabsorbent polyacrylic acid by solution polymerization. An aqueous solution of acrylic acid monomer (at about 25-30 wt %), initiators, neutralizing base, antioxidants, crosslinkers (such as trimethylolpropane triacrylate) and optionally other additives are combined in a polymerization reactor and polymerization is initiated. Bases that can be used for neutralization include but are not limited to sodium carbonate, sodium hydroxide, and potassium hydroxide.

[0605] The reactor contents are deoxygenated for 60 minutes. The temperature of the polymerization reaction is allowed to rise to an initial desired level. The reactor is then maintained at a desired hold temperature for a period of time necessary for the desired monomer conversion to be achieved. The resulting reaction product is in the form of a high-viscosity gel. The high-viscosity, gel-like reaction product is then processed into a film or a strand, dried and ground into particles which are screened or classified into various particle size fractions. After the polymer is dried and ground to final particulate size, it is analyzed for residual acrylic acid and other chemicals, extractable centrifuge capacity, shear modulus, and absorption under load. Other polymer properties may be measured, including molecular mass, molecular mass distribution, density, viscosity, melting temperature, and glass-transition temperature. Surface treatments may be performed by adding a cross-linking co-monomer to the surface of the polymer particles.

[0606] The polyacrylic acid produced is intended for use as a superabsorbent polymer, as an absorbent for water and aqueous solutions for diapers, adult incontinence products, feminine hygiene products, and similar consumer products, as well as for possible uses in agriculture, horticulture, and other fields.

### Example 26

### Alternative Prophetic Example of Production of a Superabsorbent Polymer

[0607] Acrylic acid, such as that provided in Example 22, is further converted to a superabsorbent polyacrylic acid by suspension polymerization. An aqueous phase comprising water, acrylic acid monomer, and neutralizing base is combined with an oil phase comprising an inert hydrophobic liquid and optionally a suspending agent is further provided. The aqueous phase and the oil phase are contacted under conditions

[0608] (including a temperature of about 75° C.) such that fine monomer droplets are formed. Polymerization is initiated, and the polymerized microparticles of polyacrylic acid are recovered from the suspension using a centrifuge.

[0609] The polyacrylic acid is then dried and ground into particles which are screened or classified into various particle size fractions. After the polymer is dried and ground to final particulate size, it is analyzed for residual acrylic acid and other chemicals, extractable centrifuge capacity, shear modulus, and absorption under load. Other polymer properties may be measured, including molecular mass, molecular mass distribution, density, viscosity, melting temperature, and glass-transition temperature.

[0610] The polyacrylic acid produced is intended for use as a superabsorbent polymer, as an absorbent for water and aqueous solutions for diapers, adult incontinence products, feminine hygiene products, and similar consumer products, as well as for possible uses in agriculture, horticulture, and other fields.

### Example 27

### Prophetic Example of Conversion of Acrylic Acid to Methyl Acrylate

[0611] Acrylic acid, such as that provided in Example 22, is converted to methyl acrylate by direct, catalyzed esterification. Acrylic acid is contacted with methanol, and the mixture is heated to about 50° C. in the presence of an esterification catalyst. Water formed during esterification is removed from the reaction mixture by distillation. The progress of the esterification reaction is monitored by measuring the concentration of acrylic acid and/or methanol in the mixture.

[0612] Reactive with other monomers and imparting strength and durability to acrylic co-polymers, methyl acrylate is a useful monomer for coatings for leather, paper, floor coverings and textiles. Resins containing methyl acrylate can be formulated as elastomers, adhesives, thickeners, amphoteric surfactants, fibers and plastics. Methyl Acrylate is also used in production of monomers used to make water treatment materials and in chemical synthesis.

### Example 28

### Prophetic Example of Conversion of Acrylic Acid to Ethyl Acrylate

[0613] Acrylic acid, such as that provided in Example 19, is converted to ethyl acrylate by direct, catalyzed esterification. Acrylic acid is contacted with ethanol, and the mixture is heated to about 75° C. in the presence of an esterification catalyst. Water formed during esterification is removed from the reaction mixture by distillation. The progress of the esterification reaction is monitored by measuring the concentration of acrylic acid and/or ethanol in the mixture.

[0614] Ethyl acrylate is used in the production of homopolymers and co-polymers for use in textiles, adhesives and sealants. Ethyl acrylate is also used in the production of co-polymers, for example acrylic acid and its salts, esters, amides, methacrylates, acrylonitrile, maleates, vinyl acetate, vinyl chloride, vinylidene chloride, styrene, butadiene and unsaturated polyesters. In addition, ethyl acrylate is used in chemical synthesis.

### Example 29

### Prophetic Example of Conversion of Acrylic Acid to Butyl Acrylate

[0615] Acrylic acid, such as that provided in Example 22, is converted to butyl acrylate by direct, catalyzed esterification. Acrylic acid is contacted with 1-butanol, and the mixture is heated to about 100° C. in the presence of an esterification catalyst. Water formed during esterification is removed from the reaction mixture by distillation. The progress of the esterification reaction is monitored by measuring the concentration of acrylic acid and/or ethanol in the mixture.

[0616] Butyl acrylate is used in the production of homopolymers and co-polymers for use in water-based industrial and architectural paints, enamels, adhesives, caulks and sealants, and textile finishes, utilizing homopolymers and co-polymers with methacrylates, acrylonitrile, maleates, vinyl acetate, vinyl chloride, vinylidene chloride, styrene, butadiene or unsaturated polyesters.

### Example 30

### Prophetic Example of Conversion of Acrylic Acid to Ethylhexyl Acrylate

[0617] Acrylic acid, such as that provided in Example 22, is converted to ethylhexyl acrylate by direct, catalyzed esterification. Acrylic acid is contacted with 2-ethyl-1-hexanol, and the mixture is heated to about 120° C. in the presence of an esterification catalyst. Water formed during esterification is removed from the reaction mixture by distillation. The progress of the esterification reaction is monitored by measuring the concentration of acrylic acid and/or ethanol in the mixture.

[0618] Ethylhexyl acrylate is used in the production of homopolymers and co-polymers for caulks, coatings and pressure-sensitive adhesives, paints, leather finishing, and textile and paper coatings.

### Example 31

### Prophetic Example of Conversion of Acrylates to End Products, Including Consumer Products

[0619] One or more acrylates as provided in Examples 24-27 is further converted to one or more of adhesives, surface coatings, water-based coatings, paints, inks, leather finishes, paper coatings, film coatings, plasticizers, or precursors for flocculants. Such conversions to end products employ methods known in the art.

### Example 32

### Prophetic Example of Acrylic-Based Paint Manufacture

[0620] An aqueous dispersion comprising at least one particulate water-insoluble copolymer that includes one or more of acrylic acid, ethyl acrylate, methyl acrylate, 2-ethylhexyl acrylate, butyl acrylate, lauryl acrylate or other copolymer obtained from acrylic acid converted from 3-HP microbially produced, as described elsewhere herein, is obtained by mixing such components together under sufficient agitation to form a stable dispersion of the copolymers. The copolymers have an average molecular weight that is at least 50,000, with the copolymer particles having diameters in the range of 0.5 to 3.0 microns, Other components in the aqueous dispersion may include pigment, filler (e.g., calcium carbonate, aluminum silicate), solvent (e.g., acetone, benzol, alcohols, etc., although these are not found in certain no VOC paints), thickener, and additional additives depending on the conditions, applications, intended surfaces, etc.

[0621] In variations of such acrylic-based paints, co-polymers in addition to the acrylic-based polymers may be added. Such other co-polymers may include, but are not limited to vinyl acetate, vinyl fluoride, vinylidene chloride, methacrylic acid, itaconic acid, maleic acid, and styrene.

### Example 33

### Prophetic Example of Conversion of 3-HP to 1,3-Propanediol

[0622] Acrylic acid, such as that provided in Example 22, is converted to 1,3-propanediol. 3-HP is hydrogenated in the presence of an unsupported ruthenium catalyst, in a liquid phase, to prepare 1,3-propanediol. The liquid phase includes water and cyclohexane. The hydrogenation is carried out continuously in a stirred tank reactor at a temperature of about 150° C. and a pressure of about 1000 psi. The progress of hydrogenation is monitored by measuring the concentration of 3-HP and/or hydrogen in the reactor.

### Example 34

### Prophetic Example of Conversion of 3-HP to Malonic Acid

[0623] Acrylic acid, such as that provided in Example 22, is converted to malonic acid by catalytic oxidation of 3-HP by a supported catalyst comprising Rh. The catalytic oxidation is carried out in a fixed-bed reactor operated in a trickle-bed procedure. In the trickle-bed procedure the aqueous phase comprising the 3-HP starting material, as well as the oxidation products of the same and means for the adjustment of pH, and oxygen or an oxygen-containing gas can be conducted in counterflow. In order to achieve a sufficiently short reaction time, the conversion is carried out at a pH of about 8. The oxidation is carried out at a temperature of about 40° C. Malonic acid is obtained in nearly quantitative yields.

### Example 35

### Increased Copy of Genetic Elements in the 3HPTGC Confer Tolerance to 3-HP

[0624] Data from a SCALEs evaluation of library clone fitness related to 3-HP exposure, using the SCALEs technique, affords clear evidence of the relevance as to 3-HP tolerance of a number of genes and enzymes. From this data, and in view of fitness data from other portions of the 3HPTGC, a broad view may be obtained that appropriate modifications of any of the genes or enzymes of the 3HPTGC and/or provision of nucleic acid sequences that provide an enzyme activity of such enzymes (without necessarily encoding the entire enzyme) may result in an altered enzymatic activity that leads to increased 3-HP tolerance.

[0625] The method used to measure 3-HP tolerance conferred by genes in the 3HPTGC is summarized as follows.

### Bacteria, Plasmids, and Library Construction

[0626] Wild-type Escherichia coli K12 (ATCC #29425) was used for the preparation of genomic DNA. Six samples of purified genomic DNA were digested with two blunt cutters AluI and RsaI (Invitrogen, Carlsbad, Calif. USA) for different respective times—10, 20, 30, 40, 50 and 60 minutes at 37 C, and then were heat inactivated at 70 C for 15 minutes. Restriction digestions were mixed and the fragmented DNA was separated based on size using agarose gel electrophoresis. Respective DNA fragments of 0.5, 1, 2, 4 and greater than 8 kb sizes were excised from the gel and purified with a gel extraction kit (Qiagen) according to manufacturer's instructions. Genomic libraries were constructed by ligation of the respective purified fragmented DNA with the pSMART-LCKAN vector (Lucigen, Middleton, Wis. USA) according to manufacturer's instructions. Each ligation product was then electroporated into E. Cloni 100 Supreme Electrocompetent Cells (Lucigen) and plated on LB+kanamycin. Colonies were harvested and plasmid DNA was extracted using Qiagen HiSpeed Plasmid Midi Kit according to manufacturer's instructions. Purified plasmid DNA of each library was introduced into Escherichia coli strain Mach1-T1® (Invitrogen, Carlsbad, Calif. USA) by electroporation. These cultures, representing each library—0.5, 1.0, 2.0, 4.0 and >8.0 kb of genomic DNA, were combined and incubated at 37 C to a desired density, to an OD₆₀₀ of approximately 0.50. This combined library culture mixture was used for selection. (See section herein and also see Lynch, M., Warencke, T E, Gill, R T, SCALEs: multiscale analysis of library enrichment. Nature Methods, 2007. 4(87-93); Warnecke, T. E., Lynch, M. D., Karimpour-Fard, A., Sandoval, N., Gill, R. T., A genomics approach to improve the analysis and design of strain selections. Metabolic Engineering, 2008 10(154-156)). Mach1-T1^{R} containing pSMART-LCKAN empty vector were used for all control studies. Growth curves were done in MOPS Minimal Medium (See Neidhardt, F., Culture medium for enterobacteria. J Bacteriol, 1974. 119: p. 736-747.). Antibiotic concentration was 20 ug kanamycin/mL.

### 3-HP Preparation

[0627] 3-HP was obtained from TCI America (Portland, Oreg.). Significant acrylic acid and 2-oxydipropionic contamination was observed via HPLC analysis. Samples were subsequently treated by diethyl ether extraction to remove acrylic acid and a portion of the 2-oxydipropionic contaminants. Samples were then neutralized with 10 M NaOH to a final pH of 7.0. Considerable insoluble matter was observed at neutral pH at concentrations in excess of approximately 35 g/L. Neutralized samples were centrifuged at 4000 rpm for 30 minutes at 4° C. The soluble 3-HP fraction was isolated from the thus-centrifuged insoluble matter and further analyzed by HPLC for a final quantification of concentration and purity of the working stock solution. The working stock solution was used for the selection and MIC evaluations in this example.

### Selections

[0628] As noted herein, five representative genomic libraries were created from E. coli K12 genomic DNA with defined insert sizes of 0.5, 1, 2, 4, and 8 kb, each library was transformed into MACH1™-T1® E. coli, cultured and then mixed. The mixture was aliquoted into two 15 mL screw cap tubes with a final concentration of 20 g/L 3-HP (TCI America) neutralized to pH 7 with 10 M NaOH. The cell density of the selection cultures was monitored as they approached a final OD₆₀₀ of 0.3-0.4. The original selection cultures were subsequently used to inoculate another round of 15 mL MOPS minimal media+kanamycin+3-HP as part of a repeated batch selection strategy. Overall, a selection was carried out over 8 serial transfer batches with a decreasing gradient of 3-HP over 60 hours. More particularly, the 3-HP concentrations were 20 g 3-HP/L for serial batches 1 and 2, 15 g 3-HP/L for serial batches 3 and 4, 10 g 3-HP/L for serial batches 5 and 6, and 5 g 3-HP/L for serial batches 7 and 8. For serial batches 7 and 8 the culture media was replaced as the culture approached stationary phase to avoid nutrient limitations. (Also see Warnecke, T. E., Lynch, M. D., Karimpour-Fard, A., Sandoval, N., Gill, R. T., A genomics approach to improve the analysis and design of strain selections. Metabolic Engineering, 2008 10(154-156), incorporated by reference herein). Batch transfer times were adjusted as needed to avoid a nutrient limited selection environment. Samples were taken at the culmination of each batch. Repeated batch cultures containing 3-HP were monitored and inoculated over a 60 hour period to enhance the concentration of clones exhibiting increased growth in the presence of 3-HP. Samples were taken by plating 1 mL of the selected population onto selective plates (LB with kanamycin) with each batch. Plasmid DNA was extracted from each sample and hybridized to Affymetrix E. Coli Antisense GeneChip® arrays (Affymetrix, Santa Clara, Calif.) according to previous work (See Lynch, M., Warencke, T E, Gill, R T, SCALEs: multiscale analysis of library enrichment. Nature Methods, 2007. 4(87-93)) and manufacturer's instructions.

### Data Analysis

[0629] Data analysis was completed by utilizing SCALEs-appropriate software as described herein and also in Lynch, M., Warencke, T E, Gill, R T, SCALEs: multiscale analysis of library enrichment. Nature Methods, 2007. 4(87-93)). Fitness contributions from specific genomic elements were calculated from the enrichment of each region as a fraction of the selected population, as was previously described (Lynch, M., Warencke, T E, Gill, R T, SCALEs: multiscale analysis of library enrichment. Nature Methods, 2007. 4(87-93)). Briefly, plasmid DNA from samples taken at the culmination of each batch in the selection were hybridized to Affymetrix E. Coli Antisense GeneChip® arrays per above and data obtained from this was further analyzed. For each array, signal values corresponding to individual probe sets were extracted from the Affymetrix data file and partitioned into probe sets based on similar affinity values (Naef, F. and Magnasco, M. O., 2003, Solving the riddle of the bright mismatches: labeling and effective binding in oligonucleotide arrays. Phys. Rev. E 68, 011906). Background signal for each probe was subtracted according to conventional Affymetrix algorithms (MAS 5.0). Non-specific noise was determined as the intercept of the robust regression of the difference of the perfect match and mismatch signal against the perfect match signal. Probe signals were then mapped to genomic position as the tukey bi-weight of the nearest 25 probe signals and were de-noised by applying a medium filter with a 1000 bp window length. Gaps between probes were filled in by linear interpolation. This continuous signal was decomposed using an N-sieve based analysis and reconstructed on a minimum scale of 500 bp as described in detail by Lynch et al (2007). Signals were further normalized by the total repressor of primer (ROP) signal, which is on the library vector backbone and represents the signal corresponding to the total plasmid concentration added to the chip.

[0630] The analysis decomposed the microarray signals into corresponding library clones and calculated relative enrichment of specific regions over time. In this way, genome-wide fitness (ln(Xᵢ/Xᵢ₀)) was measured based on region specific enrichment patterns for the selection in the presence of 3-HP. Genetic elements and their corresponding fitness were then segregated by metabolic pathway based on their EcoCyc classifications (ecocyc.org). This fitness matrix was used to calculate both pathway fitness (W) and frequency of enrichment found in the selected population.

$${W}_{pathway} = {\sum }_{1}^{n} {W}_{i}$$

$$frequency = \frac{number of genes from metabolic pathway}{total genes in pathway}$$

[0631] Pathway redundancies were identified by an initial rank ordering of pathway fitness, followed by a specific assignment for genetic elements associated with multiple pathways to the primary pathway identified in the first rank, and subsequent removal of the gene-specific fitness values from the secondary pathways.

[0632] Similarly genes in a given genetic element were assigned fitness independent of neighboring genes in a genetic element as follows: The fitness of any gene was calculated as the sum of the fitness of all clones that contained that gene. This was followed by an initial rank ordering of gene fitness, followed by a specific assignment for genetic elements associated with multiple genes to the dominant gene identified in genetic element with the highest rank, with the subsequent removal of the fitness values from the non dominant genes in a genetic element.

[0633] Data was further analyzed by construction of receiver operator characteristics (“ROC”) according to traditional signal detection theory (T. Fawcett, “An introduction to ROC analysis,” Pattern Recog. Let. (2006)27:861-874). Data was categorized according to four standard classes—true positive, false positive, true negative, and false negative, using the fitness values for respective genetic elements per above and specific growth rates measured in the presence of 20 g/L 3-HP, using standard methods of analysis and cutoff values for fitness of 0.1, 1.0, 10 and 20 were chosen in an effort to optimize the range of true and false positive rates. A data point representing a genetic element of a clone was denoted a true positive if the reported fitness was greater than the cutoff value and the separately measured growth rate was significantly increased when compared with the negative control. A false positive had reported fitness that was greater than the cutoff value but a growth rate not significantly greater than that of the negative control. A clone was designated a true negative only if the corresponding fitness was less than the cutoff value and it yielded significantly reduced growth rates, i.e., not significantly greater than that of the negative control, and a false negative refers to a clone having a reduced fitness score but demonstrating an increased growth rate, i.e., significantly greater than that of the negative control.

[0634] An ROC curve is constructed by plotting the true positive rate (sensitivity) versus the false positive rate (1-specificity) (See T. E. Warnecke et al. Met. Engineering 10 (2008):154-165). Accordingly, it may be stated with confidence that clones (and their respective genetic elements) identified with increased fitness confer tolerance to 3-HP over the control.

### Results

[0635] FIG. 9A, sheets 1-7, graphically shows the genes identified in the 3HPTGC for E. coli. In addition Table 3 gives cumulative fitness values as calculated herein for some of the genes in the 3HPTGC.

[0636] 3-HP Toleragenic Complexes also were developed for the gram-positive bacterium Bacillus subtilis, for the yeast Saccharomyces cerevisiae, and for the bacterium Cupriavidus necator. These are depicted, respectively, in FIGS. 9B-D, sheets 1-7.

### Example 36

### Additions of 3HPTGC Products, Part 1

[0637] Based on the examples, and conceptualization of the 3HPTGC, it is possible to increase the 3-HP tolerance of a microorganism by adding limiting enzymatic conversion products (i.e., product(s) of an enzymatic conversion step) of the 3HPTGC. This example demonstrates the addition of some such products to increase 3-HP tolerance in E. coli.

### Bacteria, Plasmids, and Media

[0638] Wild-type Escherichia coli K12 (ATCC #29425) was used for the preparation of genomic DNA. Mach1-T1^{R} was obtained from Invitrogen (Carlsbad, Calif. USA).

### 3-HP Preparation

[0639] 3-HP was obtained from TCI America (Portland, Oreg.). Significant acrylic acid and 2-oxydipropionic contamination was observed via HPLC analysis. Samples were subsequently treated by diethyl ether extraction to remove acrylic acid and a portion of the 2-oxydipropionic contaminants. Samples were then neutralized with 10 M NaOH to a final pH of 7.0. Considerable 3-HP polymerization was observed at neutral pH at concentrations in excess of approximately 35 g/L. Neutralized samples were centrifuged at 4000 rpm for 30 minutes at 4° C. The soluble 3-HP fraction was isolated from the solid polymer product and further analyzed by HPLC for a final quantification of concentration and purity of the working stock solution. The working stock solution was used for the selection, growth rates and MIC evaluations in this example.

### Minimum Inhibitory Concentrations

[0640] The minimum inhibitory concentration (MIC) using commercially obtained 3-HP (TCI America, Portland, Oreg. USA, see 3-HP preparation herein) was determined microaerobically in a 96 well-plate format. Overnight cultures of strains were grown in 5 ml LB (with antibiotic where appropriate). A 1 v/v % was used to inoculate a 15 ml conical tube filled to the top with MOPS minimal media and capped. After the cells reached mid exponential phase, the culture was diluted to an OD₆₀₀ of 0.200. The cells were further diluted 1:20 and a 10 ul aliquot was used to inoculate each well (˜10⁴ cells per well). The plate was arranged to measure the growth of variable strains or growth conditions in increasing 3-HP concentrations, 0-70 g/L, in 5 g/L increments, as well as either media supplemented with optimal supplement concentrations which were determined to be: 2.4 mM tyrosine (Sigma), 3.3 mM phenylalanine (Sigma), 1 mM tryptophan (Sigma), 0.2 mM p-hydroxybenzoic acid hydrazide (MP Biomedicals), 0.2 mM p-aminobenzoic acid (MP Biomedicals), 0.2 mM 2,3-dihydroxybenzoic acid (MP Biomedicals), 0.4 mM shikimic acid (Sigma), 2 mM pyridoxine hydrochloride (Sigma), 35 uM homoserine (Acros), 45 uM homocysteine thiolactone hydrochloride (MP Biomedicals), 0.5 mM oxobutanoate (Fluka), 5 mM threonine (Sigma). The minimum inhibitory 3-HP concentration (i.e., the lowest concentration at which there is no visible growth) and the maximum 3-HP concentration corresponding to visible cell growth (OD˜0.1) were recorded after 24 hours (between 24 and 25 hours, although data indicated no substantial change in results when the time period was extended).

### Results

[0641] 3-HP tolerance of E. coli Mach1-T1^{R} was increased by adding the supplements to the media. The supplementation described herein resulted in the following MIC increases: 40% (tyrosine), 33% (phenylalanine), 33% (tryptophan), 33% (p-hydroxybenzoic acid hydrazide), 7% (p-aminobenzoic acid), 33% (2,3-didyroxybenzoic acid), 0% (pyridoxine hydrochloride), 33% (homoserine), 60% (homocysteine thiolactone hydrochloride), 7% (oxobutanoate), and 3% (threonine).

### Example 37

### Additions of 3HPTGC Products, Part 2 (Using New Source of 3-HP)

[0642] Based on the examples, and conceptualization of the 3HPTGC, it is possible to increase the 3-HP tolerance of a microorganism by adding limiting enzymatic conversion products (at least some of which alternatively may be termed “intermediates”) of the 3HPTGC. This example demonstrates the addition of putrescine, spermidine, cadaverine and sodium bicarbonate to increase 3-HP tolerance in E. coli. The concept of ‘limiting’ as used in this context refers to a hypothesized limitation that if overcome may demonstrate increased 3-HP tolerance by a subject microorganism or system. As a non-exclusive approach, such hypothesized limitation may be confirmed experimentally, as by a demonstration of increased tolerance to 3-HP upon addition of a particular enzymatic conversion product or other compound.

### Bacteria, Plasmids, and Media

[0643] Wild-type Escherichia coli K12 (ATCC #29425) was used for the preparation of genomic DNA. M9 minimal and EZ rich media are described in Subsection II of the Common Methods Section.

### 3-HP Preparation

[0644] 3-HP was obtained from Beta-propiolactone as described in Subsection III of the Common Method Section.

### Minimum Inhibitory Concentrations

[0645] The minimum inhibitory concentration (MIC) of 3-HP for E. coli (see 3-HP preparation herein) was determined aerobically in a 96 well-plate format. Overnight cultures of strains were grown in 5 ml LB (with antibiotic where appropriate) at 37° C. in a shaking incubator. A 1 v/v % was used to inoculate 10 mL of M9 minimal media. After the cells reached mid-exponential phase, the culture was diluted to an OD₆₀₀ of 0.200. The cells were further diluted 1:20 and a 10 ul aliquot was used to inoculate each well (˜10⁴ cells per well). The plate was arranged to measure the growth of variable strains or growth conditions in increasing 3-HP concentrations, 0-100 g/L, in 10 g/L increments, in M9 minimal media, supplemented with putrescine (0.1 g/L, MP Biomedicals, Santa Ana, Calif. USA), cadaverine (0.1 g/L, MP Biomedicals) or spermidine (0.1 g/L, Sigma-Aldrich, St. Louis, Mo., USA) or sodium bicarbonate (20 mM, Fisher Scientific, Pittsburgh, Pa. USA) (values in parentheses indicate final concentrations in media). The minimum inhibitory 3-HP concentration (i.e., the lowest concentration at which there is no visible growth) and the maximum 3-HP concentration corresponding to visible cell growth (OD˜0.1) were recorded after 24 hours (between 24 and 25 hours, although data (not shown) indicated no substantial change in results when the time period was extended). The MIC endpoint is the lowest concentration of compound at which there was no visible growth.

### Results

[0646] 3-HP tolerance of E. coli was increased by adding the polyamines putrescine, spermidine and cadaverine to the media. Minimum inhibitory concentrations (MICs) for E. coli K12 in control and supplemented media were as follows: in M9 minimal media supplemented with putrescine 40 g/L, in M9 minimal media supplemented with spermidine 40 g/L, in M9 minimal media supplemented with cadavarine 30 g/L. Minimum inhibitory concentrations (MICs) for added sodium bicarbonate in M9 minimal media was 30 g/L. The Minimum inhibitory concentrations (MICs) for E. coli K12 in 100 g/L stock solution 3-HP was 20 g/L.

[0647] In view of the increase over the control MIC with sodium bicarbonate supplementation, other alteration, such as regulation and/or genetic modification of carbonic anhydrase (not presently shown in FIG. 9A1-7, but related directly to HCO₃⁻), such as providing a heterologous nucleic acid sequence to a cell of interest, where that nucleic acid sequence encodes a polypeptide possessing carbonic anhydrase activity are considered of value to increase tolerance to 3-HP (such as in combination with other alterations of the 3HPTGC). Similarly, and as supported by other data provided herein, alterations of the enzymatic activities, such as by genetic modification(s) of enzyme(s) along the 3HPTGC pathway portions that lead to arginine, putrescine, cadaverine and spermidine, are considered of value to increase tolerance to 3-HP (such as in combination with other alterations of the 3HPTGC).

### Example 38

### Genetic Modification of aroH for Increased 3-HP Tolerance

[0648] Based on the identification of the tyrA-aroF operon as a genetic element conferring tolerance to 3-HP at increased copy, this enzymatic activity was further examined. The wild type aroF gene is inhibited by increasing concentrations of end products tyrosine and phenylalanine. However, to bypass this inherent feedback inhibition control, a feedback resistant mutant of the aroH gene was obtained and introduced into a cell as follows.

### Clone Construction

[0649] PCRn was used to amplify the E. coli K12 genomic DNA corresponding to the aroF-tyrA region with primers designed to include the upstream aroFp promoter and the rho-independent transcriptional terminators. Ligation of the purified, fragmented DNA with the pSMART-kanamycin vectors was performed with the CloneSMART kit (Lucigen, Middleton, Wis. USA) according to manufacturer's instructions. The ligation product was then transformed into chemically competent Mach1-T1^{R} E. coli cells (Invitrogen, Carlsbad, Calif. USA), plated on LB+kanamycin, and incubated at 37° C. for 24 hours. To confirm the insertion of positive transformants, plasmids were isolated from clones using a Qiaprep Spin MiniPrep Kit from Qiagen (Valencia, Calif.) and sequenced (Macrogen, South Korea).

[0650] Plasmids containing the wild-type aroH gene (CB202) and a mutant version exhibiting resistance to tryptophan feedback inhibition (CB447) via a single amino acid change (G149D) were obtained from Ray et al (Ray, J. M., C. Yanofsky, and R. Baurele, Mutational analysis of the catalytic and feedback sites of the tryptophan-sensitive 3-deoxy-D-arabino-heptulosante-7-phosphate synthase of Escherichia coli. J Bacteriol, 1988. 170(12):p. 5500-6.). These plasmids were constructed with the pKK223-3 backbone vector containing the ptac promoter and rrNBT1 transcriptional terminator. The aroH inset DNA was amplified according to traditional PCRn methodology with primers designed to include both the promoter and terminator. Purified PCRn products were ligated with the pBT-1 plasmid and transformed into electrocompetent Mach1-T1® (Lynch, M. D. and R. T. Gill, A series of broad host range vectors for stable genomic library construction. Biotechnology and Bioengineering, 2006. 94(1): p. 151-158). The resulting plasmid sequence is given in (SEQ ID NO:001). Optimal induction levels were determined by minimum inhibitory concentration assays to be 0.001 mM IPTG.

### MIC Comparisons

[0651] MIC evaluations were conducted as described for Example 35. A Mach1-T1® cell culture comprising the aroH mutant was compared with a control cell culture, both in MOPS minimal media.

### Results

[0652] As measured by fold increase in MIC, the cells comprising the aroH mutant exhibited a MIC 1.4 times greater than the control MIC. This represents a 40 percent improvement. Accordingly, this example demonstrates one of many possible genetic modification approaches to increasing 3-HP tolerance in a selected cell, based on knowledge of the importance of the 3HPTGC in 3-HP tolerance.

### Example 39

### Genetic Modification via Cyanase Introduction for Increased 3-HP Tolerance

[0653] A plasmid clone containing the cynTS genes from E. coli K12 was obtained from selections described in Example 35. This plasmid called pSMART-LC-Kan-cynTS was isolated and purified according to standard methods. (Sequencing of the plasmid revealed a final sequence (SEQ ID NO:002)). Purified plasmid was retransformed into E. coli K12 by standard techniques and MIC measured as described in Example 37. 3-HP tolerance improvement by the plasmid containing the cynTS genes.

[0654] Minimum inhibitory concentrations (MICs) of 3-HP for E. coli K12 and E. coli K12+pSMART-LC-Kan-cynTS in M9 minimal media were 30 g/L, and 50 g/L respectively. Thus, an over sixty percent improvement in the MIC, signifying an increase in 3-HP tolerance, was observed in this example which comprised only one genetic modification of the 3HPTGC in the E. coli host cell. Accordingly, this example again demonstrates one of many possible genetic modification approaches to increasing 3-HP tolerance in a selected cell, based on knowledge of the importance of the 3HPTGC in 3-HP tolerance and appropriate use of that knowledge.

### Example 40

### Development of a Nucleic Acid Sequence Encoding a Protein Sequence Comprising Oxaloacetate Alpha-Decarboxylase Activity (Partial Prophetic)

[0655] Several 2-keto acid decarboxylases with a broad substrate range have been previously characterized (Pohl, M., Sprenger, G. A., Muller, M., A new perspective on thiamine catalysis. Current Opinion in Biotechnology, 15(4), 335-342 (2004)). Of particular interest is an enzyme from M. tuberculosis, alpha-ketoglutarate decarboxylase, which has been purified and characterized (Tian, J., Bryk, R. Itoh, M., Suematsu, M., and Carl Nathan, C. Variant tricarboxylic acid cycle in Mycobacterium tuberculosis: Identification of alpha-ketoglutarate decarboxylase. PNAS. Jul. 26, 2005 vol. 102(30): 10670-10677; Stephanopoulos, G., Challenges in engineering microbes for biofuels production. Science, 2007. 315(5813):801-804). The reaction carried out by this enzyme is depicted in FIG. 16B (FIG. 16A showing the predominant known chemical reaction by the enzyme encoded by the native kgd gene). The native kgd gene has previously been cloned, expressed and purified from E. coli without technical difficulty or toxic effects to the host strain (Tian, J., Bryk, R. Itoh, M., Suematsu, M., and Carl Nathan, C. Variant tricarboxylic acid cycle in Mycobacterium tuberculosis: Identification of alpha-ketoglutarate decarboxylase. PNAS. Jul. 26, 2005 vol. 102(30):10670-10677; Stephanopoulos, G., Challenges in engineering microbes for biofuels production. Science, 2007. 315(5813):801-804). This enzyme has also been chosen as it is unlikely to be associated with the alpha-ketoglutarate dehydrogenase. Of additional interest is that a convenient colorimetric method has been developed to assay this enzymatic activity. The kgd enzyme is evolved as provided herein to have a measurable enzymatic function depicted in FIG. 16B, the decarboxylation of oxaloacetate to malonate semialdehyde. The technical work to achieve this relies largely upon traditional selection and screening of mutants of the alpha-keto-glutarate decarboxylase that have the desired oxaloacetate alpha-decarboxylase activity.

[0656] As a first step a mutant library is constructed of the kgd gene that will be used for selections or screening. The protein sequence for the alpha-ketoglutarate decarboxylase from M. tuberculosis was codon optimized for E. coli according to a service from DNA 2.0 (Menlo Park, Calif. USA), a commercial DNA gene synthesis provider. The nucleic acid sequence was synthesized with an eight amino acid N-terminal tag to enable affinity based protein purification. This gene sequence incorporated an NcoI restriction site overlapping the gene start codon and was followed by a HindIII restriction site. In addition a Shine Delgarno sequence (i.e., a ribosomal binding site) was placed in front of the start codon preceded by an EcoRI restriction site. This gene construct was synthesized by DNA 2.0 and provided in a pJ206 vector backbone.

[0657] A circular plasmid based cloning vector termed pKK223-kgd for expression of the alpha-ketoglutarate decarboxylase in E. coli was constructed as follows. Plasmid DNA pJ206 containing the gene synthesized kgd gene was subjected to enzymatic restriction digestion with the enzymes EcoRI and HindIII obtained from New England BioLabs (Ipswich, Mass. USA) according to manufacturer's instructions. The digestion mixture was separated by agarose gel electrophoresis, and visualized under UV transillumination as described in Subsection II of the Common Methods Section. An agarose gel slice containing a DNA piece corresponding to the kgd gene was cut from the gel and the DNA recovered with a standard gel extraction protocol and components from Qiagen according to manufacturer's instructions. An E. coli cloning strain bearing pKK223-aroH was obtained as a kind a gift from the laboratory of Prof. Ryan T. Gill from the University of Colorado at Boulder. Cultures of this strain bearing the plasmid were grown by standard methodologies and plasmid DNA was prepared by a commercial miniprep column from Qiagen (Valencia, Calif. USA) according to manufacturer's instructions. Plasmid DNA was digested with the restriction endonucleases EcoRI and HindIII obtained from New England BioLabs (Ipswich, Mass. USA) according to manufacturer's instructions. This digestion served to separate the aroH reading frame from the pKK223 backbone. The digestion mixture was separated by agarose gel electrophoresis, and visualized under UV transillumination as described in Subsection II of the Common Methods Section. An agarose gel slice containing a DNA piece corresponding to the backbone of the pKK223 plasmid was cut from the gel and the DNA recovered with a standard gel extraction protocol and components from Qiagen (Valencia, Calif. USA) according to manufacturer's instructions.

[0658] Pieces of purified DNA corresponding to the kgd gene and pKK223 vector backbone were ligated and the ligation product was transformed via electroporation according to manufacturer's instructions. The sequence of the resulting vector termed pKK223-kgd (SEQ ID NO:004) was confirmed by routine sequencing performed by the commercial service provided by Macrogen (Rockville, Md. USA). pKK223-kgd confers resistance to beta-lactamase and contains the kgd gene of M. tuberculosis under control of a ptac promoter inducible in E. coli hosts by IPTG.

[0659] Plasmid pKK223-kgd was propagated and purified DNA prepared by standard methodologies. Plasmids were introduced into XL1-Red chemically competent cells (Stratagene, LaJolla, Calif.) in accordance with the manufacturer's instructions, plated onto LB+100 micrograms/mL ampicillin, and incubated at 37° C. for >24 hours. Dilution cultures with 1/1000 of the original transformation volume were plated on LB+100 micrograms/mL ampicillin in triplicate. Greater than 1000 colonies were obtained, corresponding to approximately 10⁷ mutant cells per transformation. Colonies were harvested by gently scraping the plates into TB media. The cultures were immediately resuspended by vortexing, and aliquoted into 1 mL freezer stock cultures with a final glycerol concentration of 15% (v/v) (Sambrook and Russell, 2001). The remainder of the culture was pelleted by centrifugation for 15 minutes at 3000 rpm. Plasmid DNA was extracted according to the manufacturer's instructions using a HiSpeed Plasmid Midi Kit (Qiagen, Valencia, Calif.). Purified plasmid DNA from each mutant library was introduced into E. coli 10GF′ (Lucigen, Middleton, Wis. USA) by electroporation. 1/1000 volume of this transformation was plated on LB+kanamycin in triplicate to determine transformation efficiency and adequate transformant numbers (>10̂6).

[0660] The selection based approach described herein allows for the rapid identification of a kgd mutant with oxaloacetate alpha-decarboxylase activity. An available strain of E. coli, strain AB354, is used as a host for the selection (Bunch, P. K., F. Mat-Jan, N. Lee, and D. P. Clark. 1997. The ldhA gene encoding the fermentative lactate dehydrogenase of Escherichia coli. Microbiology 143:187-195). This auxotrophic E. coli strain has a mutation in panD, encoding aspartate decarboxylase. The product of this reaction, beta-alanine is an essential intermediate in the synthesis of pantothenate, a precursor to coenzyme A. The block in coenzyme A synthesis confers an inability of this E. coli strain to grow on minimal media without supplementation (Cronoan, J. E., Little, K. J., Jackowski, S.; Genetic and Biochemical Analyses of Pantothenate Biosynthesis in Escherichia coli and Salmonella typhimurium. J. of Bacteriology, 149(3), 916-922 (1982); Cronan, J. E., Beta-Alanine Synthesis in Escherichia coli J. of Bacteriology, 141(3), 1291-1297 (1980)). The expression of gabT from R. norvegicus confers beta-alanine aminotransferase activity to E. coli (Tunnicliff, G.; Ngo, T. T.; Rojo-Ortega, J. M.; Barbeau, A.; The inhibition by substrate analogues of gamma-aminobutyrate aminotransferase from mitochondria of different subcellular fractions of rat brain Can. J. Biochem. 55, 479-484 (1977)). This enzyme can utilize malonate semialdehyde as a substrate to produce beta-alanine. A strain of E. coli AB354 expressing gabT (E. coli AB354+gabT) in addition to a mutant kgd gene having oxaloacetate alpha-decarboxylase activity is capable of producing the metabolite beta-alanine and have a restored ability to grown on minimal media. Expected results of the selection are depicted in FIG. 18.

[0661] Similar to the kgd gene, a codon and expression optimized R. norvegicus gabT gene is obtained via gene synthesis from the commercial provider DNA 2.0 (Menlo Park, Calif. USA). It is subsequently cloned into an expression plasmid.

[0662] The mutant library of kgd genes is introduced into E. coli strain AB354 expressing the gabT gene. This population will then be grown on minimal media plates. Individual mutants expressing the desired oxaloacetate alpha-decarboxylase activity are expected to show a restored ability to form colonies under these conditions. These clones are isolated and the mutant proteins they express subsequently are selected for oxaloacetate alpha-decarboxylase activity.

[0663] With the successful construction selection of a mutant kgd library for oxaloacetate alpha-decarboxylase activity, it will be necessary to confirm that these mutants have the desired enzymatic activity. Thus, mutants positive for oxaloacetate alpha-decarboxylase activity are confirmed for alpha-decarboxylase activity. To accomplish this, a colorimetric screening approach is taken from current standard methodologies. This approach is illustrated in FIG. 19. This approach necessitates the expression and purification of the mutant enzymes and reaction with the purified enzyme, its cofactor (thiamin pyrophosphate) and the appropriate substrate. Protein expression and purification is performed with standard methodologies.

### Example 41

### One-Liter Scale Bio-Production of 3-HP Using E. Coli DF40+pKK223+MCR

[0664] Using E. coli strain DF40+pKK223+MCR that was produced in accordance with Example 1, a batch culture of approximately 1 liter working volume was conducted to assess microbial bio-production of 3-HP.

[0665] E. coli DF40+pKK223+MCR was inoculated from freezer stocks by standard practice (Sambrook and Russell, 2001) into a 50 mL baffled flask of LB media plus 200 μg/mL ampicillin where indicated and grown to stationary phase overnight at 37° C. with shaking at 225 rpm. In the morning, this culture was used to inoculate (5% v/v) a 1-L bioreactor vessel comprising M9 minimal media plus 5% (w/v) glucose plus 200 μg/mL ampicillin, plus 1 mM IPTG, where indicated. The bioreactor vessel was maintained at pH 6.75 by addition of 10 M NaOH or 1 M HCl, as appropriate. The dissolved oxygen content of the bioreactor vessel was maintained at 80% of saturation by continuous sparging of air at a rate of 5 L/min and by continuous adjustment of the agitation rate of the bioreactor vessel between 100 and 1000 rpm. These bio-production evaluations were conducted in at least triplicate. To monitor growth of these cultures, optical density measurements (absorbance at 600 nm, 1 cm path length), which correlates to cell number, were taken at the time of inoculation and every 2 hrs after inoculation for the first 12 hours. On day 2 of the bio-production event, samples for optical density and other measurements were collected every 3 hours. For each sample collected, cells were pelleted by centrifugation and the supernatant was collected for analysis of 3-HP production as described per “Analysis of cultures for 3-HP production” in the Common Methods section. Preliminary final titer of 3-HP in this 1-liter bio-production volume was calculated based on HPLC analysis to be 0.7 g/L 3-HP. It is acknowledged that there is likely co-production of malonate semialdehyde, or possibly another aldehyde, or possibly degradation products of malonate semialdehyde or other aldehydes, that are indistinguishable from 3-HP by this HPLC analysis.

### Example 42

### Tolerance Plus Bio-Production Pathway (Prophetic Example)

[0666] Using methods known to those skilled in the art, including those provided in the Common Methods Section, and also using specific methods from the other examples herein as to making and incorporating nucleic acid sequences to provide increased 3-HP tolerance and to provide 3-HP bio-production, genetic modifications are made to a selected microorganism to provide heterologous nucleic acid sequences that increase both 3-HP tolerance and 3-HP production above levels found in the non-modified microorganism. A plasmid or other vector or a DNA sequence (for direct incorporation) is constructed that comprises one or more nucleic acid sequences that encode for enzyme(s) or other polypeptide(s) that, when combined into and expressed in the selected microorganism, increase(s) tolerance to 3-HP by modifying one or more aspects of the 3HPTGC. That or a different plasmid or other vector or a DNA sequence (for direct incorporation) is constructed to comprise one or more nucleic acid sequences that encode for enzyme(s) or other polypeptide(s) that, when expressed in the selected microorganism, provide for (or increase) 3-HP bio-production.

[0667] In the case of plasmids, the plasmid(s) is/are contacted with the selected microorganism under suitable conditions to promote transformation, and transformed microorganisms are selected for and identified. In the case of other vectors or the DNA sequence(s), these are introduced to the selected microorganism by methods well-known to those skilled in the art. Selection for transformed recombinant microorganisms likewise may be conducted according to methods well-known to those skilled in the art.

[0668] A first particular resultant recombinant microorganism comprises enhanced 3-HP tolerance and bio-production capabilities compared to the control, non-tolerance-modified microorganism, in which 3-HP tolerance is at least 20 percent greater than tolerance of the non-tolerance-modified control and 3-HP bio-production is at least 20 percent greater than 3-HP bio-production of the non-tolerance-modified control. 3-HP tolerance is assessed by a 24-hour Minimum Inhibitory Concentration (MIC) evaluation based on the MIC protocol provided in the Common Methods Section. 3-HP bio-production is based on a batch culture comparison lasting for at least 24 hours past lag phase, and final 3-HP titers are determined using the HPLC methods provided in the Common Methods Section.

### Example 43

### Demonstration of Suitable Metrics for Comparison of Tolerance Improvements

[0669] Growth rate data was determined for the following species under the specified conditions, aerobic and anaerobic, across a range of 3-HP concentrations in the cell cultures. This demonstrates methods that may be used to assess differences between a control and a treatment microorganism. These or other methods may be used to demonstrate tolerance differences for various embodiments of the present invention.

[0670] As shown in the accompanying figures, FIGS. 15A-O, the data may be evaluated and presented in a number of ways: a “toleragram” (showing growth rates at different 3-HP concentrations); change in optical density over the evaluation period; and number of cell doublings over the evaluation period.

[0671] These are provided to indicate non-limiting methodologies and approaches to assessing changes in tolerance, including microorganism and culture system tolerance, in addition to the use of MIC evaluations.

[0672] The following methods were used to generate the data in the noted figures.

[0673] E. coli Aerobic

[0674] Overnight cultures of wild-type E. coli BW25113 were grown in triplicate in 5 mL standard LB medium. 100 uL of overnight cultures were used to inoculate triplicate 5 mL samples of M9 minimal medium+3HP, containing 47.7 mM Na₂HPO₄, 22 mM KH₂PO₄, 8.6 mM NaCl, 18.7 mM NH₄Cl, 2 mM MgSO₄, 0.1 mM CaCl₂, and 0.4% glucose, with 3HP concentrations ranging from 0-50 g/L. Starting OD₆₀₀ ranged from 0.02-0.08. Cultures were incubated at 37 C for about 24 hours, and OD₆₀₀ was recorded every 1-2 hours for the first 8 hours with a final OD₆₀₀ recorded at about 24 hours. Maximum specific growth rates (μₘₐₓ) were calculated by determining the optimal fit of exponential trend lines with OD data for the evaluation period. Specific changes in OD₆₀₀ over approximately 24 hours (Δ_{24 hr}OD₆₀₀) were calculated as the difference in t=24 hr and t=0 optical density, Δ₂₄ₕOD₆₀₀=(ODₜ₌₂₄)−(ODₜ₌₀). Specific number of doublings (N_{d}) were calculated by solving for N in the equation 2^{N}=(ODₜ₌₂₄)/(ODₜ₌₀).

[0675] E. coli Anaerobic

[0676] Overnight cultures of wild-type E. coli BW25113 were grown in triplicate in 5 mL standard LB medium. 100 uL of overnight cultures were used to inoculate triplicate 5 mL samples of M9 minimal medium+3HP, containing 47.7 mM Na₂HPO₄, 22 mM KH₂PO₄, 8.6 mM NaCl, 18.7 mM NH₄Cl, 2 mM MgSO₄, 0.1 mM CaCl₂, and 0.4% glucose, with 3HP concentrations ranging from 0-50 g/L. Starting OD₆₀₀ ranged from 0.02-0.08. Cultures were sparged with CO₂ for 10 seconds, sealed, and incubated at 37 C for about 24 hours. OD₆₀₀ was recorded every 1-2 hours during the first 8 hours with a final OD₆₀₀ recorded at about 24 hours. For each data point the sample was opened, sampled, re-sparged with CO₂, and sealed once again. Maximum specific growth rates (μₘₐₓ) were calculated by determining the optimal fit of exponential trend lines with OD data for the evaluation period. Specific changes in OD₆₀₀ over approximately 24 hours (Δ_{24 hr}OD₆₀₀) were calculated as the difference in t=24 hr and t=0 optical density, Δ₂₄ₕOD₆₀₀=(ODₜ₌₂₄)−(ODₜ₌₀). Specific number of doublings (N_{d}) were calculated by solving for N in the equation 2^{N}=(ODₜ₌₂₄)/(ODₜ₌₀).

[0677] Bacillus Subtilis Aerobic

[0678] Overnight cultures of wild-type B. Subtilis were grown in triplicate in 5 mL standard LB medium. 100 uL of overnight cultures were used to inoculate triplicate 5 mL samples of M9 minimal medium+3HP+glutamate supplementation, containing 47.7 mM Na₂HPO₄, 22 mM KH₂PO₄, 8.6 mM NaCl, 18.7 mM NH₄Cl, 2 mM MgSO₄, 0.1 mM CaCl₂, 0.4% glucose, and 10 mM glutamate, with 3HP concentrations ranging from 0-50 g/L. Starting OD₆₀₀ ranged from 0.02-0.08. Cultures were incubated at 37 C for about 24 hours, and OD₆₀₀ was recorded every 1-2 hours for the first 8 hours with a final OD₆₀₀ recorded at about 24 hours. Maximum specific growth rates (μₘₐₓ) were calculated by determining the optimal fit of exponential trend lines with OD data for the evaluation period. Specific changes in OD₆₀₀ over approximately 24 hours (Δ_{24 hr}OD₆₀₀) were calculated as the difference in t=24 hr and t=0 optical density, Δ_{24 hr}OD₆₀₀=(ODₜ₌₂₄)−(ODₜ₌₀). Specific number of doublings (N_{d}) were calculated by solving for N in the equation 2^{N}=(ODₜ₌₂₄)/(ODₜ₌₀).

[0679] S. cerevisiae Aerobic

[0680] Overnight cultures of S. cerevisiae were grown in triplicate in 5 mL standard YPD medium containing 10 g/L yeast extract, 20 g/L peptone, and 2% glucose. 100 uL of overnight cultures were used to inoculate triplicate 5 mL samples of SD minimal medium (without vitamins)+3HP, containing 37.8 mM (NH₄)₂SO₄, 8.1 uM H₃BO₃, 0.25 uM CuSO₄, 0.6 uM KI, 1.25 uM FeCl₃, 2.65 uM MnSO₄, 1 uM Na₂MoO₄, 2.5 uM ZnSO₄, 6.25 mM KH₂PO₄, 0.86 mM K₂HPO₄, 4.15 mM MgSO₄, 1.71 mM NaCl, 0.90 mM CaCl₂, and 2% glucose, with 3HP concentrations ranging from 0-50 g/L. Starting OD₆₀₀ ranged from 0.03-0.08. Cultures were sparged with CO₂ for 10 seconds, sealed, and incubated at 30 C for about 24 hours. OD₆₀₀ was recorded every 1-2 hours for the first 8-12 hours with a final OD₆₀₀ recorded at about 24 hours. Maximum specific growth rates (μₘₐₓ) were calculated by determining the optimal fit of exponential trend lines with OD data for the evaluation period. Specific changes in OD₆₀₀ over approximately 24 hours (Δ_{24 hr}OD₆₀₀) were calculated as the difference in t=24 hr and t=0 optical density, Δ₂₄ₕOD₆₀₀=(ODₜ₌₂₄)−(ODₜ₌₀). Specific number of doublings (N_{d}) were calculated by solving for N in the equation 2^{N}=(ODₜ₌₂₄)/(ODₜ₌₀).

S. cerevisiae Anaerobic

[0681] Overnight cultures of S. cerevisiae were grown in triplicate in 5 mL standard YPD medium containing 10 g/L yeast extract, 20 g/L peptone, and 2% glucose. 100 uL of overnight cultures were used to inoculate triplicate 5 mL samples of SD minimal medium (without vitamins)+3HP, containing 37.8 mM (NH₄)₂SO₄, 8.1 uM H₃BO₃, 0.25 uM CuSO₄, 0.6 uM KI, 1.25 uM FeCl₃, 2.65 uM MnSO₄, 1 uM Na₂MoO₄, 2.5 uM ZnSO₄, 6.25 mM KH₂PO₄, 0.86 mM K₂HPO₄, 4.15 mM MgSO₄, 1.71 mM NaCl, 0.90 mM CaCl₂, and 2% glucose, with 3HP concentrations ranging from 0-50 g/L. Starting OD₆₀₀ ranged from 0.03-0.08. Cultures were sparged with CO₂ for 10 seconds, sealed, and incubated at 30 C for about 24 hours. OD₆₀₀ was recorded every 1-2 hours for the first 8-12 hours with a final OD₆₀₀ recorded at about 24 hours. For each data point the sample was opened, sampled, re-sparged with CO₂, and sealed once again. Maximum specific growth rates (μₘₐₓ) were calculated by determining the optimal fit of exponential trend lines with OD data for the evaluation period. Specific changes in OD₆₀₀ over approximately 24 hours (Δ_{24 hr}OD₆₀₀) were calculated as the difference in t=24 hr and t=0 optical density, Δ_{24 hr}OD₆₀₀=(ODₜ₌₂₄)−(ODₜ₌₀). Specific number of doublings (N_{d}) were calculated by solving for N in the equation 2^{N}=(ODₜ₌₂₄)/(ODₜ₌₀).

### Example 44

### Genetic Modification by Introduction of Genes Identified as Able to Increase Microorganism Tolerance to 3-HP

[0682] Genetic elements containing one to several genes have been identified by the SCALES 3-HP tolerance data as important to 3-HP tolerance. In order to develop an optimal combination of these elements suitable to imparting greater tolerance on an organism, a number of these genetic elements have been cloned into a series of compatible plasmids containing different origins of replication and selection markers. As such, combinations of these compatible plasmids can be transformed into cell lines in order to assess a combinatorial affect on 3-HP tolerance. The parent plasmid vectors containing the different origins of replication and selection markers are identified in the following table, which provides SEQ ID numbers (SEQ ID NOs:005-012 and 183-186) for each such parent plasmid vectors. These plasmids were used to construct the plasmids described herein, and these plasmids, without insert, were also used for constructing control cell lines for tolerance MIC testing.

TABLE 41

| Vector | Sequence |
|---|---|
| pSMART-HC-Amp | SEQID. 005 |
| pSMART-LC-Kan | SEQID. 006 |
| pBT-3 | SEQID. 007 |
| pKK223-3 | SEQID. 008 |
| pACYC177 (kan only) | SEQID. 009 |
| pWH1520 | SEQID. 010 |
| pHT08 | SEQID. 011 |
| pJ61:25125 | SEQID. 012 |
| pYes2.1-topo | SEQID. 183 |
| pRS423 | SEQID. 184 |
| pRS425 | SEQID. 185 |
| pJ251 | SEQID. 186 |

[0683] Method A: Plasmid Design and Construction of Toleragenic Genetic Elements by Gene Synthesis

[0684] A single plasmid comprising a number of identified genetic elements was constructed in a manner that a plurality of other plasmids could easily be constructed (some of which were constructed as described). These operons, including a constitutive E. coli promoter, ribosome binding sites, and open region frames of these genetic elements, were combined in the single plasmid, which was produced by the gene synthesis services of DNA2.0 (Menlo Park, Calif. USA), a commercial DNA gene synthesis provider. Each of the open reading frames for producing proteins was codon optimized according to the services of DNA2.0. Additionally, restriction sites were incorporated between each operon and gene to generate plasmids capable of expressing all combinations of these proteins through a series of restriction digests and self ligation. Other features of this constructs include an rrnB terminator sequence after the final operons and mosaic ends containing AfeI restriction sites flanking each end of the coding region for use with a EZ::TNT™ Transposon system obtained from EPICENTRE (Madison, Wis.) for future genomic incorporation of these elements into strains. This constructed plasmid was provided in a pJ61 vector backbone. The sequence of the resulting vector, termed pJ61:25135, is provided as SEQ ID NO:012.

[0685] By the method described herein various nucleic acid sequences encoding enzymes that catalyze enzymatic conversion steps of the 3HPTGC were introduced into the pJ61:25135 plasmid. As shown in the following table, the pJ61:25135 plasmid was variously modified to contain gene optimized sequences for CynS and CynT expressed under a modified Ptrc promoter located between PmlI and SfoI restriction sites, AroG expressed under a PtpiA promoter located between SfoI and SmaI restriction sites (SEQ ID NO:013), SpeD, SpeE, and SpeF expressed under a modified Ptrc promoter located between SmaI and ZraI restriction sites (SEQ ID NO:014), ThrA expressed under a PtalA promoter located between ZraI and HpaI restriction sites (SEQ ID NO:015), Asd expressed under a PrpiA promoter located between HpaI and PmeI restriction sites (SEQ ID NO:016), CysM expressed under a Ppgk promoter located between PmeI and ScaI restriction sites (SEQ ID NO:017), IroK expressed under a PtpiA promoter located between ScaI and NaeI restriction sites, and IlvA expressed under a PtalA promoter located between NaeI and EcoICRI restriction sites (SEQ ID NO:018). Each of these restriction sites is unique within the pJ61:25135 plasmid.

TABLE 42
E. coli Tolerance Plasmid Construction

| | | | | | PCRn | |
|---|---|---|---|---|---|---|
| | | | | | Sequence or | |
| | | | | | Codon | |
| Gene (s) or | | | | | Optimized | |
| Region | | Cloning | | | Sequence | Plasmid |
| Name | Vector | Method | Primer A | Primer B | (Region) | Name |
| aroG | pJ61 | A | N/A | N/A | SEQ ID 0013 | pJ61-aroG |
| speFED | pJ61 | A | N/A | N/A | SEQ ID 0014 | pJ61-speFED |
| thrA | pJ61 | A | N/A | N/A | SEQ ID 0015 | pJ61-thrA |
| Asd | pJ61 | A | N/A | N/A | SEQ ID 0016 | pJ61-asd |
| cysM | pJ61 | A | N/A | N/A | SEQ ID 0017 | pJ61-cysM |
| ilvA | pJ61 | A | N/A | N/A | SEQ ID 0018 | pJ61-ilvA |
| aroH | pKK223 | B | N/A | N/A | N/A | pKK223-aroH |
| aroH | pKK223 | B | N/A | N/A | N/A | pKK223- |
| G149C | | | | | | aroH*445 |
| aroH | pKK223 | B | N/A | N/A | N/A | pKK223- |
| G149D | | | | | | aroH*447 |
| aroH P18L | pKK223 | B | N/A | N/A | N/A | pKK223- |
| | | | | | | aroH*457 |
| metE | pKK223 | B | N/A | N/A | N/A | pKK223-metE |
| C645A | | | | | | C645A |
| thrA | pKK223 | B | N/A | N/A | SEQ IC 0019 | pKK223-thrA |
| cynTS | pSMART- | B | N/A | N/A | SEQ IC 0020 | pSmart-LC- |
| | LC-Kan | | | | | Kan-cynTS |
| folA C1 | pSMART- | C | SEQ ID 0021 | SEQ ID 0022 | SEQ ID 0023 | pSmart-LC- |
| | LC-KAN | | | | | Kan-folA-C1 |
| folA ORF | pSMART- | C | SEQ ID 0024 | SEQ ID 0025 | SEQ ID 0026 | pSmart-LC- |
| | LC-KAN | | | | | Kan-folA-ORF |
| folD | pSMART- | C | SEQ ID 0027 | SEQ ID 0028 | SEQ ID 0029 | pSmart-LC- |
| | LC-KAN | | | | | Kan-folD |
| aroKB C1 | pSMART- | C | SEQ ID 0030 | SEQ ID 0031 | SEQ ID 0032 | pSmart-LC- |
| | LC-KAN | | | | | Kan-aroKB C1 |
| pheA C1 | pSMART- | C | SEQ ID 0033 | SEQ ID 0034 | SEQ ID 0035 | pSmart-LC- |
| | LC-KAN | | | | | Kan-pheA C1 |
| pheA C2 | pSMART- | C | SEQ ID 0036 | SEQ ID 0037 | SEQ ID 0038 | pSmart-LC- |
| | LC-KAN | | | | | Kan-pheA C2 |
| menA C1 | pSMART- | C | SEQ ID 0039 | SEQ ID 0040 | SEQ ID 0041 | pSmart-LC- |
| | LC-KAN | | | | | Kan-menA C1 |
| menA ORF | pSMART- | C | SEQ ID 0042 | SEQ ID 0043 | SEQ ID 0044 | pSmart-LC- |
| | LC-KAN | | | | | Kan-menA |
| | | | | | | ORF |
| serA | pSMART- | C | SEQ ID 0045 | SEQ ID 0046 | SEQ ID 0047 | pSmart-LC- |
| | LC-KAN | | | | | Kan-serA |
| glyA C1 | pSMART- | C | SEQ ID 0048 | SEQ ID 0049 | SEQ ID 0050 | pSmart-LC- |
| | LC-KAN | | | | | Kan-glyA C1 |
| glyA ORF | pSMART- | C | SEQ ID 0051 | SEQ ID 0052 | SEQ ID 0053 | pSmart-LC- |
| | LC-KAN | | | | | Kan-glyA |
| | | | | | | ORF |
| metC C1 | pSMART- | C | SEQ ID 0054 | SEQ ID 0055 | SEQ ID 0056 | pSMART-LC- |
| | LC-KAN | | | | | KAN-metC C1 |
| tyrA | pSMART- | C | SEQ ID 0057 | SEQ ID 0058 | SEQ ID 0059 | pSmart-LC- |
| | LC-KAN | | | | | Kan-tyrA |
| tyrA-aroF | pSMART- | C | SEQ ID 0060 | SEQ ID 0061 | SEQ ID 0062 | pSmart-LC- |
| | LC-KAN | | | | | Kan-tyrA-aroF |
| aroE | pSMART- | C | SEQ ID 0063 | SEQ ID 0064 | SEQ ID 0065 | pSmart-LC- |
| | LC-KAN | | | | | Kan-aroE |
| ilvA | pSMART- | C | SEQ ID 0066 | SEQ ID 0067 | SEQ ID 0068 | pSmart-LC- |
| | LC-KAN | | | | | KAN-ilvA C1 |
| ilvA | pSMART- | C | SEQ ID 0069 | SEQ ID 0070 | SEQ ID 0071 | pSmart-LC- |
| | LC-KAN | | | | | KAN-ilvA |
| | | | | | | operon |
| cysM | pSMART- | C | SEQ ID 0072 | SEQ ID 0073 | SEQ ID 0074 | pSmart-LC- |
| | LC-KAN | | | | | Kan-cysM |
| cynTS | pSMART- | D | SEQ ID 0075 | SEQ ID 0076 | SEQ ID 0077 | pSmart-HC- |
| | HC-AMP | | | | | Amp-cynTS |
| metC | pSMART- | D | SEQ ID 0078 | SEQ ID 0079 | SEQ ID 0080 | pSmart-HC- |
| | HC-Amp | | | | | Amp-metC |
| dapA | pSMART- | E | SEQ ID 0081* | SEQ ID | SEQ ID 0083 | pSmart-HC- |
| | HC-Amp | | | 0082* | | Amp-dapA |
| cadA | pSMART- | E | SEQ ID 0084* | SEQ ID | SEQ ID 0086 | pSmart-HC- |
| | HC-Amp | | | 0085* | | Amp-cadA |
| prs | pSMART- | E | SEQ ID 0087* | SEQ ID | SEQ ID 0089 | pSmart-HC- |
| | HC-Amp | | | 0088* | | Amp-prs |
| nrdAB | pSMART- | E | SEQ ID 0090* | SEQ ID | SEQ ID 0092 | pSmart-HC- |
| | HC-Amp | | | 0091* | | Amp-nrdAB |
| nrdLEF | pSMART- | E | SEQ ID 0093* | SEQ ID | SEQ ID 0095 | pSmart-HC- |
| | HC-Amp | | | 0094* | | Amp-nrdLEF |
| lysA | pSMART- | E | SEQ ID 0096* | SEQ ID | SEQ ID 0098 | pSMART-HC- |
| | HC-Amp | | | 0097* | | Amp-lysA |
| cyntTS | pACYC177 | F | SEQ ID 0099 | SEQ ID 0100 | SEQ ID 0101 | pACYC177- |
| | (kan only) | | | | | cynTS |
| aroH | pACYC177 | F | SEQ ID 0102 | SEQ ID 0103 | SEQ ID 0104 | pACYC177- |
| G149C | (kan only) | | | | | aroH* |
| speB | pACYC177 | F | SEQ ID 0105 | SEQ ID 0106 | SEQ ID 0107 | pACYC177- |
| | (kan only) | | | | | speB |
| metE | pACYC177 | F | SEQ ID 0108 | SEQ ID 0109 | SEQ ID 0110 | pACYC177- |
| C645A | (kan only) | | | | | metE* |
| metC | pACYC177 | F | SEQ ID 0111 | SEQ ID 0112 | SEQ ID 0113 | pACYC177- |
| | (kan only) | | | | | metC |
| cyntTS | pBT-3 | G | SEQ ID 0114 | SEQ ID 0115 | SEQ ID 0116 | pBT-3-cynTS |
| aroH | pBT-3 | G | SEQ ID 0117 | SEQ ID 0118 | SEQ ID 0119 | pBT-3-aroH* |
| G149C | | | | | | |
| speB | pBT-3 | G | SEQ ID 0120 | SEQ ID 0121 | SEQ ID 0122 | pBT-3-speB |

*5′phosphorylated

[0686] To create a set of plasmids containing each of these single operons, a series of restrictions and self-ligations are performed. As such, any operons can be isolated by removal of the DNA sequences between its flanking restriction sites and the EcoICRI and PmlI sites flanking the entire protein coding region of the plasmid. For example, the plasmid comprising the operon comprising the AroG polypeptide, expressed under a PtpiA promoter and located between SfoI and SmaI restriction sites, was created by first digesting the pJ61:25135 plasmid with PmlI and SfoI obtained from New England BioLabs (Ipswich, Mass. USA) according to manufacturer's instructions. The resulting DNA was then self-ligated with T4 DNA ligase obtained from New England BioLabs (Ipswich, Mass. USA) according to manufacturer's instructions, and transformed into E. coli K12. Individual colonies from this E. coli K12 transformation were grown in liquid culture and plasmids from individual colonies were isolated using a Qiagen Miniprep kit (Valencia, Calif. USA) according to manufacturer's instructions, The isolated plasmids were screened by restriction digests with AfeI, and correct plasmids were carried on the next round of restriction and self ligation. In the second round, these plasmids were subjected to restriction with SmaI and EcoICRI obtained from New England BioLabs (Ipswich, Mass. USA) and Promega Corporation (Madison, Wis.), respectively, according to manufacturer's instructions. The resulting DNA was then self-ligated with T4 DNA ligase obtained from New England BioLabs (Ipswich, Mass. USA) according to manufacturer's instructions, and transformed into E. coli K12. Individual colonies from this E. coli K12 transformation were grown in liquid culture and plasmids from individual colonies were isolated using a Qiagen Miniprep kit (Valencia, Calif. USA) according to manufacturer's instructions, The isolated plasmids were screened by restriction digests with AfeI, and verified by sequencing.

[0687] In a similar manner using the corresponding restriction sites listed above the following plasmids were created: pJ61-IlvA expressed under a PtalA promoter located between NaeI and EcoICRI restriction sites; pJ61-CysM expressed under a Ppgk promoter located between PmeI and ScaI restriction sites; pJ61-Asd expressed under a PrpiA promoter located between HpaI and PmeI restriction sites; pJ61-ThrA expressed under a PtalA promoter located between ZraI and HpaI restriction sites; pJ61-SpeDEF expressed under a Ptrc promoter located between SmaI and ZraI restriction sites; pJ61-AroG expressed under a PtpiA promoter located between SfoI and SmaI restriction sites; and pJ61-CynTS expressed under a Ptrc promoter located between PmlI and SfoI restriction sites. Likewise, any combination of these operons can be obtained via a similar restriction and self-ligation scheme.

[0688] These sequence-verified plasmids were transformed into BW25113 E. coli cells as tested for tolerance to 3-HP. In addition, these plasmids can be restricted with AfeI and the purified piece containing the individual operons with mosaic ends can be incorporated into the genome of a cell line using the EZ::TN™ Transposon system obtained from EPICENTRE (Madison, Wis.) using the manufactures instructions. Likewise, these operons can be moved to any variety of plasmids from providing additional control of expression or for propagation in a variety of strains or organisms.

Method B: Plasmid Containing Identified Elements Received from Other Labs

[0689] After development of the map of the 3HPTGC, a literature review identified previous work on several of the identified genes. Requests were made to the laboratories that made these reports for plasmids containing either the wild-type or mutated genes for the elements identified in the 3HPTGC. The so-obtained gene and the proteins they encode are identified by sequence numbers.

[0690] Plasmids containing the wild-type aroH gene and aroH mutants were kindly provided as a gift from the Bauerle laboratory at the University of Virginia. These mutants were described in Ray J M, Yanofsky C, Bauerle R., J. Bacteriol. 1988 December; 170(12):5500-6. Mutational analysis of the catalytic and feedback sites of the tryptophan-sensitive 3-deoxy-D-arabino-heptulosonate-7-phosphate synthase of Escherichia coli. Along with a pKK223 plasmid containing the wild-type gene, three additional pKK223 plasmids were provided containing mutated genes coding for a glycine to cysteine mutation at position 149, a glycine to aspartic acid mutation at position 149, and a proline to leucine mutation at position 18.

[0691] A plasmid containing a mutant metE gene was kindly provided as a gift from the Matthews laboratory at the University of Michigan. This mutant was described in Hondorp E R, Matthews R G. J. Bacteriol. 2009 May; 191(10):3407-10. Epub 2009 Mar. 13. Oxidation of cysteine 645 of cobalamin-independent methionine synthase causes a methionine limitation in Escherichia coli. This pKK233 plasmid carries a metE gene coding for a mutation of a cysteine to an alanine at position 645.

[0692] The sequences for the encoded proteins for these genes are provided as SEQ ID NOs: 022 to 026.

Method C: Tolerance Plasmids Construction in a pSMART-LC-Kan Vector

[0693] Several of the genetic elements that were assessed for their affects on 3-HP tolerance were constructed in a pSMART-LC-kan vector (SEQ ID NO:027) obtained from Lucigen Corporation (Middleton Wis., USA). This vector provides a low copy replication origin and kanamycin selection. All of these plasmids were created in a similar method and the introduced genetic elements and the proteins they encode are identified by sequence numbers in Table 42 under the method C section therein. Each row in Table 42, under method C, contains the respective sequence information for the protein contained within the cloned plasmid, the primers used in any polymerase chain reactions, and the sequence of the polymerase chain reaction product used to create the new plasmid.

[0694] In each case, an identical procedure was used to create the final plasmid. The primers listed were used to amplify the correct insert using pfx DNA polymerase from Invitrogen Corporation (Carlsbad, Calif. USA) and genomic E. coli K12 DNA as template using the manufacturer's instructions. The 5′ termini or the amplified DNA product were phosphorylated using T4 polynucleotide kinase for New England Biolabs (Ipswich, Mass. USA) using the manufacturer's instructions. The resulting product of this reaction was separated by agarose gel electrophoresis, and a band of the expected size was isolated by dissecting it from the gel and gel extracting the DNA using a gel extraction kit provided by Qiagen Corporation (Valencia, Calif. USA). The extracted phosphorylated DNA was then blunt-end ligated into the pSMART-LC-Kan vector and transformed into 100 E. coli cells using the manufacturer's instructions. Transformed cells were allowed to recover in rich media and then were plated on to LB agar plated containing kanamycin for proper selection. After colony growth, single colonies were grown in LB media and plasmid DNA was extracted using miniprep kits obtained from Qiagen Corporation (Valencia, Calif. USA). The isolated plasmid DNA was checked by restriction digest and sequenced verified before use in other experiments.

Method D: Tolerance Plasmids Construction in a pSMART-HC-Amp Vector

[0695] Several of the genetic elements that were assessed for their affects on 3-HP tolerance were constructed in a pSMART-HC-AMP vector obtained from Lucigen Corporation (Middleton Wis., USA). This vector provides a high copy replication origin and ampicillin selection. All of these plasmids were created in a similar method and are identified as method D in table 42. Each row in Table 42 contains the sequence information for the protein contained within the cloned plasmid, the primers used in any polymerase chain reactions, and the sequence of the polymerase chain reaction product used to create the new plasmid.

[0696] In each case, an identical procedure was used to create the final plasmid. The primers listed were used to amplify the correct insert using KOD DNA polymerase from EMD Chemical Corporation (Gibbstown, N.J. USA) and the pKK223 plasmids for each corresponding gene or genetic elements created with method B of Table 42 as template using the manufacturer's instructions. The 5′ termini of the amplified DNA product were phosphorylated using T4 polynucleotide kinase for New England Biolabs (Ipswich, Mass. USA) using the manufacturer's instructions. The resulting product of this reaction was separated by agarose gel electrophoresis, and a band of the expected size was isolated by dissecting it from the gel and gel extracting the DNA using a gel extraction kit provided by Qiagen Corporation (Valencia, Calif. USA). The extracted phosphorylated DNA was then blunt-end ligated into the pSMART-HC-AMP vector and transformed into 10G E. coli cells using the manufacturer's instructions. Transformed cells were allowed to recover in rich media and then were plated on to LB agar plated containing ampicillin for proper selection. After colony growth, single colonies were grown in LB media and plasmid DNA was extracted using miniprep kits obtained from Qiagen Corporation (Valencia, Calif. USA). The isolated plasmid DNA was checked by restriction digest and sequenced verified before use in other experiments.

Method E: Additional Tolerance Plasmids Construction in a pSMART-HC-Amp Vector

[0697] Several of the genetic elements that were assessed for their affects on 3-HP tolerance were constructed in a pSMART-HC-AMP vector obtained from Lucigen Corporation (Middleton Wis., USA). This vector provides a high copy replication origin and ampicillin selection. All of these plasmids were created in a similar method and are identified as method E in Table 42. Each row in Table 42 contains the sequence information for the protein contained within the cloned plasmid, the primers used in any polymerase chain reactions, and the sequence of the polymerase chain reaction product used to create the new plasmid.

[0698] In each case, an identical procedure was used to create the final plasmid. The primers listed were used to amplify the correct insert using KOD DNA polymerase from EMD Chemical Corporation (Gibbstown, N.J. USA) and genomic E. coli K12 DNA as template using the manufacturer's instructions. Since the 5′ termini of the primers were already phosphorylated, no other treatment was needed for the amplified product. The resulting product of this reaction was separated by agarose gel electrophoresis, and a band of the expected size was isolated by dissecting it from the gel and gel extracting the DNA using a gel extraction kit provided by Qiagen Corporation (Valencia, Calif. USA). The extracted phosphorylated DNA was then blunt-end ligated into the pSMART-HC-Amp vector and transformed into 10G E. coli cells using the manufacturer's instructions. Transformed cells were allowed to recover in rich media and then were plated on to LB agar plated containing ampicillin for proper selection. After colony growth, single colonies were grown in LB media and plasmid DNA was extracted using miniprep kits obtained from Qiagen Corporation (Valencia, Calif. USA). The isolated plasmid DNA was checked by restriction digest and sequenced verified before use in other experiments.

Method F: Tolerance Plasmids Construction in a pACYC177 (Kan Only) Vector

[0699] Several of the genetic elements that were assessed for their affects on 3-HP tolerance were constructed in a pACYC177 (Kan only) vector. This backbone was created by amplifying a portion of the pACYC177 plasmid using the primer CPM0075 (5′-CGCGGTATCATTGCAGCAC-3′) (SEQ ID NO:123) and primer CPM0018 (5′-GCATCGGCTCTTCCGCGTCAAGTCAGCGTAA-3′) (SEQ ID NO:124) using KOD polymerase from EMD Chemical Corporation (Gibbstown, N.J. USA). The resulting product of this reaction was separated by agarose gel electrophoresis, and a band of the expected size was isolated by dissecting it from the gel and gel extracting the DNA using a gel extraction kit provided by Qiagen Corporation (Valencia, Calif. USA). This DNA was designated pACYC177 (Kan only) and was kept for ligation to the products created herein. This pACYC177 (Kan only) backbone DNA provides low copy replication origin and kanamycin selection. All of these plasmids were created in a similar method and are identified as method F in Table 42. Each row in Table 42 contains the sequence information for the protein contained within the cloned plasmid, the primers used in any polymerase chain reactions, and the sequence of the polymerase chain reaction product used to create the new plasmid.

[0700] In each case, an identical procedure was used to create the final plasmid. The primers listed were used to amplify the correct insert using KOD DNA polymerase from EMD Chemical Corporation (Gibbstown, N.J. USA) using the manufacturer's instructions with either the pKK223 plasmids for each corresponding gene (or genetic element) created with method B of Table 42 or with genomic E. coli DNA as template. The 5′ termini or the amplified DNA product were phosphorylated using T4 polynucleotide kinase for New England Biolabs (Ipswich, Mass. USA) using the manufacturer's instructions. The resulting product of this reaction was separated by agarose gel electrophoresis, and a band of the expected size was isolated by dissecting it from the gel and gel extracting the DNA using a gel extraction kit provided by Qiagen Corporation (Valencia, Calif. USA). The extracted phosphorylated DNA was then blunt-end ligated to the pACYC177 (Kan only) backbone DNA described herein and transformed into 10G E. coli cells using the manufacturer's instructions. Transformed cells were allowed to recover in rich media and then were plated on to LB agar plated containing kanamycin for proper selection. After colony growth, single colonies were grown in LB media and plasmid DNA was extracted using miniprep kits obtained from Qiagen Corporation (Valencia, Calif. USA). The isolated plasmid DNA was checked by restriction digest and sequenced verified before use in other experiments.

Method G: Tolerance Plasmids Construction in a pBT-3 Vector

[0701] Several of the genetic elements that were assessed for their affects on 3-HP tolerance were constructed in a pBT-3 vector. This backbone was created by amplifying a portion of the pBT-3 plasmid using the primer PBT-FOR (5′-AACGAATTCAAGCTTGATATC-3′) (SEQ ID NO:125) and primer PBT-REV (5′-GAATTCGTTGACGAATTCTCTAG-3′) (SEQ ID NO:126) using KOD polymerase from EMD Chemical Corporation (Gibbstown, N.J. USA). The resulting product of this reaction was separated by agarose gel electrophoresis, and a band of the expected size was isolated by dissecting it from the gel and gel extracting the DNA using a gel extraction kit provided by Qiagen Corporation (Valencia, Calif. USA). This DNA was designated pBT-3 backbone and was kept for ligation to the products created herein. This pBT-3 backbone DNA provides low copy replication origin and chloramphenicol selection. All of these plasmids were created in a similar method and are identified as method G in Table 42. Each row in Table 42 contains the sequence information for the protein contained within the cloned plasmid, the primers used in any polymerase chain reactions, and the sequence of the polymerase chain reaction product used to create the new plasmid.

[0702] In each case, an identical procedure was used to create the final plasmid. The primers listed were used to amplify the correct insert using KOD DNA polymerase from EMD Chemical Corporation (Gibbstown, N.J. USA) using the manufacturer's instructions with either the pKK223 plasmids for each corresponding gene (or genetic element) created with method B of Table 42 or with genomic E. coli DNA as template. The 5′ termini or the amplified DNA product were phosphorylated using T4 polynucleotide kinase for New England Biolabs (Ipswich, Mass. USA) using the manufacturer's instructions. The resulting product of this reaction was separated by agarose gel electrophoresis, and a band of the expected size was isolated by dissecting it from the gel and gel extracting the DNA using a gel extraction kit provided by Qiagen Corporation (Valencia, Calif. USA). The extracted phosphorylated DNA was then blunt-end ligated to the pBT-3 backbone DNA described herein and transformed into 10G E. coli cells using the manufacturer's instructions. Transformed cells were allowed to recover in rich media and then were plated on to LB agar plated containing chloramphenicol for proper selection. After colony growth, single colonies were grown in LB media and plasmid DNA was extracted using miniprep kits obtained from Qiagen Corporation (Valencia, Calif. USA). The isolated plasmid DNA was checked by restriction digest and sequenced verified before use in other experiments.

### Example 45

### Evaluation of a Novel Peptide Related to 3-HP Tolerance

[0703] A novel 21 amino acid peptide, termed IroK, has been discovered that increases 3-HP tolerance.

### Methods: IroK Expression Studies

[0704] Primers including the entire IroK polypeptide region and RBS flanked by EcorI and HindIII restriction sites were obtained for expression studies (Operon, Huntsville, Ala.):

(SEQ ID NO: 127)
(5′-AATTCGTGGAAGAAAGGGGAGATGAAGCCGGCATTACGCGATT
TCATCGCCATTGTGCAGGAACGTTTGGCAAGCGTAACGGCATAA-3′,
(SEQ ID NO: 128)
5′-AGCTTTATGCCGTTACGCTTGCCAAACGTTCCTGCACAATGGCGA
TGAAATCGCGTAATGCCGGCTTCATCTCCCCTTTCTTCCACG-3′)

[0705] Primers including the IroK peptide region and RBS with a mutated start site (ATG to TTG) were used for the translational analysis:

(SEQ ID NO: 187)
(5′-AATTCGTGGAAGAAAGGGGAGTTGAAGCCGGCATTACGCGATTTC
ATCGCCATTGTGCAGGAACGTTTGGCAAGCGTAACGGCATAA-3′,
(SEQ ID NO: 188)
5′-AGCTTTATGCCGTTACGCTTGCCAAACGTTCCTGCACAATGGCGAT
GAAATCGCGTAATGCCGGCTTCAACTCCCCTTTCTTCCACG-3′)

[0706] The two oligonucleotides were added in a 1:1 ratio and annealed according to standard methodology in a thermal cycler. Ligation of the annealed primer product with the pKK223-3 expression vector (SEQ ID NO:008, Pharmacia, Piscataway, N.J.) was performed with T4 Ligase (Invitrogen, Carlsbad, Calif.) and incubated at 25° C. overnight. The ligation product was then electroporated into competent MACH1™-T1^{R}, plated on LB+ampicillan, and incubated at 37° C. for 24 hours. Plasmids were isolated and confirmed by purification and subsequent restriction digest and sequencing (Macrogen, Rockville, Md.). MICs were then determined corresponding to 1 mM IPTG induction.

### Minimum Inhibitory Concentrations (MIC)

[0707] The minimum inhibitory concentration (MIC) was determined microaerobically in a 96 well-plate format. Overnight cultures of strains were grown in 5 mL LB (with antibiotic where appropriate). A 1% (v/v) inoculum was introduced into a 15 ml culture of MOPS minimal media. After the cells reached mid-exponential phase, the culture was diluted to an OD₆₀₀ of 0.200. The cells were further diluted 1:20 and a 10 aliquot was used to inoculate each well of a 96 well plate (˜10⁴ cells per well). The plate was arranged to measure the growth of variable strains or growth conditions in increasing 3-HP concentrations, 0 to 70 g/L, in 5 g/L increments. The minimum inhibitory 3-HP concentration and maximum 3-HP concentration corresponding to visible cell growth (OD˜0.1) was recorded after 24 hours.

### Results

[0708] To explore the effects of IroK, a peptide comprised of 21 amino acids (MKPALRDFIAIVQERLASVTA, SEQ ID NO:129), the sequence encoding for it along with the native predicted RBS was incorporated into an inducible expression vector (pKK223-3). FIG. 20 shows increased expression of the short 87 bp sequence which is sufficient to enhance tolerance to 3-HP (>2 fold increase in MIC). Additionally, the tolerance mechanism appears to be specific to 3-HP growth inhibition, as MICs remained unchanged for several other organic acids of similar molecular makeup including lactic, acrylic, and acetic acids. In an effort to dissect the mode of tolerance conferred, a nearly identical sequence was incorporated into the same vector with a single mutation in the translational start site (ATG to TTG), resulting in a decreased MIC equivalent to that of wild-type E. coli (FIG. 20). This result implies that the mechanism of tolerance is specific to the expression of the translated polypeptide rather than mapped to the DNA or RNA level.

[0709] A nucleic acid sequence encoding the IroK peptide, or suitable variants of it, may be provided to a microorganism, that may comprise one or more genetic modifications of the 3HPTGC to further increase 3-HP tolerance, and that also may have 3-HP production capability.

### Example 46

### Genetic Modification/Introduction of Malonyl-CoA Reductase for 3-HP Production in E. coli DF40

[0710] The nucleotide sequence for the malonyl-coA reductase gene from Chloroflexus aurantiacus was codon optimized for E. coli according to a service from DNA 2.0 (Menlo Park, Calif. USA), a commercial DNA gene synthesis provider. This gene sequence incorporated an EcoRI restriction site before the start codon and was followed by a HindIII restriction site. In addition a Shine Delgarno sequence (i.e., a ribosomal binding site) was placed in front of the start codon preceded by an EcoRI restriction site. This gene construct was synthesized by DNA 2.0 and provided in a pJ206 vector backbone. Plasmid DNA pJ206 containing the synthesized mcr gene was subjected to enzymatic restriction digestion with the enzymes EcoRI and HindIII obtained from New England BioLabs (Ipswich, Mass. USA) according to manufacturer's instructions. The digestion mixture was separated by agarose gel electrophoresis, and visualized under UV transillumination as described in Subsection II of the Common Methods Section. An agarose gel slice containing a DNA piece corresponding to the mcr gene was cut from the gel and the DNA recovered with a standard gel extraction protocol and components from Qiagen (Valencia, Calif. USA) according to manufacturer's instructions. An E. coli cloning strain bearing pKK223-aroH was obtained as a kind a gift from the laboratory of Prof. Ryan T. Gill from the University of Colorado at Boulder. Cultures of this strain bearing the plasmid were grown by standard methodologies and plasmid DNA was prepared by a commercial miniprep column from Qiagen (Valencia, Calif. USA) according to manufacturer's instructions. Plasmid DNA was digested with the restriction endonucleases EcoRI and HindIII obtained from New England Biolabs (Ipswich, Mass. USA) according to manufacturer's instructions. This digestion served to separate the aroH reading frame from the pKK223 backbone. The digestion mixture was separated by agarose gel electrophoresis, and visualized under UV transillumination as described in Subsection II of the Common Methods Section. An agarose gel slice containing a DNA piece corresponding to the backbone of the pKK223 plasmid was cut from the gel and the DNA recovered with a standard gel extraction protocol and components from Qiagen according to manufacturer's instructions.

[0711] Pieces of purified DNA corresponding to the mcr gene and pK223 vector backbone were ligated and the ligation product was transformed and electroporated according to manufacturer's instructions. The sequence of the resulting vector termed pKK223-mcr (SEQ ID NO:189) was confirmed by routine sequencing performed by the commercial service provided by Macrogen (USA). pKK223-mcr confers resistance to beta-lactamase and contains mcr gene under control of a Ptac promoter inducible in E. coli hosts by IPTG.

[0712] The expression clone pKK223-mcr and pKK223 control were transformed into both E. coli K12 and E. coli DF40 via standard methodologies. (Sambrook and Russell, 2001).

### Example 47

### Construction of E. coli Gene Deletion Strains

[0713] The following strains were obtained from the Keio collection: JW1650 (ΔpurR), JW2807 (ΔlysR), JW1316 (ΔtyrR), JW4356 (ΔtrpR), JW3909 (ΔmetJ), JW0403 (ΔnrdR). The Keio collection was obtained from Open Biosystems (Huntsville, Ala. USA 35806). Individual clones may be purchased from the Yale Genetic Stock Center (New Haven, Conn. USA 06520). These strains each contain a kanamycin marker in place of the deleted gene. For more information concerning the Keio Collection and the curing of the kanamycin cassette please refer to: Baba, T et al (2006). Construction of Escherichia coli K12 in-frame, single-gene knockout mutants: the Keio collection. Molecular Systems Biology doi:10.1038/msb4100050 and Datsenko K A and B L Wanner (2000). One-step inactivation of chromosomal genes in Escherichia coli K-12 using PCR products. PNAS 97, 6640-6645. These strains were made electro-competent by standard methodologies. Each strain was then transformed via standard electroporation methods with the plasmid pCP20, which was a kind gift from Dr. Ryan Gill (University of Colorado, Boulder, Colo. USA). Transformations were plated on Luria Broth agar plates containing 20 μg/mL chloramphenicol and 100 μg/mL ampicillin and incubated for 36 hours at 30 degrees Celsius. Clones were isolated from these transformation and grown overnight in 10 mL of M9 media lacking any antibiotics. Colonies were isolated from these cultures by streaking onto Luria Broth agar plates lacking any antibiotics. Colonies were confirmed to have lost the kanamycin marker as well as the plasmid pCP20 by confirming no growth on Luria broth agar plates containing the antibiotics, kanamycin (20 μg/mL), chloramphenicol (20 μg/mL) and ampicillin (100 μg/mL). Isolated clones were confirmed by colony PCRn to have lost the kanamycin cassette. PCRns were carried out using EconoTaq PLUS GREEN 2× master PCRn mix, obtained from Lucigen, (Catalog #30033) (Middleton, Wis. USA). PCRns were carried out using a 96 well gradient ROBOcycler (Stratagene, La Jolla, Calif. USA 92037) with the following cycles: 1) 10 min at 95 degrees Celsius, 2) 30 of the following cycles, a) 1 min at 95 degrees Celsius, b) 1 min at 52 degrees Celsius, b) 2 min at 72 degrees Celsius, followed by 3) 1 cycle of 10 minutes at 72 degrees Celsius. The Primers used for the PCRns to confirm the removal of the kanamycin cassette for each of the clones are given in the following table. Primers were purchased from Integrated DNA Technologies (Coralville, Iowa USA). The resulting cured strains, called BX_{—}00341.0, BX_{—}00342.0, BX_{—}00345.0, BX_{—}00346.0, BX_{—}00348.0 and BX_{—}00349.0, correspond to JW1316 (ΔtyrR), JW4356 (ΔtrpR), JW3909 (ΔmetJ), JW1650 (ΔpurR), JW2807 (ΔlysR) and JW0403 (ΔnrdR) respectively.

TABLE 43

| Keio Clone Number | Gene Deletion | Forward Primer | Reverse Primer |
|---|---|---|---|
| JW1650 | purR | SEQ ID: 130 | SEQ ID: 131 |
| JW2807 | lysR | SEQ ID: 132 | SEQ ID: 133 |
| JW1316 | tyrR | SEQ ID: 134 | SEQ ID: 135 |
| JW4356 | trpR | SEQ ID: 136 | SEQ ID: 137 |
| JW3909 | metJ | SEQ ID: 138 | SEQ ID: 139 |
| JW0403 | nrdR | SEQ ID: 140 | SEQ ID: 141 |

### Example 48

### E. coli Strain Construction

[0714] According to the respective combinations in Tables 44 and 45, plasmids were introduced into the respective base strains. All plasmids were introduced at the same time via electroporation using standard methods. Transformed cells were grown on the appropriate media with antibiotic supplementation and colonies were selected based on their appropriate growth on the selective media.

TABLE 44
E. coli Genetic Modification Results under Aerobic Conditions

| | | | | | | | | | % |
|---|---|---|---|---|---|---|---|---|---|
| | | | Chromosomal | | | MIC Assay | | MIC | Increase |
| | | | Genetic | Vector based Genetic | Tolerance | Result | P- | Assay | Over |
| Strain Name | Media (M9 +) | Parent | Modifications | Modifications | Group | (g/L 3-HP) | value | Number | Control |
| BX_00138.0 | Kan (20 μg/mL) | BW25113 | wild type | pSmart-LC-Kan | None | 25 | <0.1 | ≧3 | — |
| BX_00300.0 | Kan 20 μg/mL | BW25113 | wild type | pSmart-LC-Kan-tyrA- | A | 35 | <0.1 | ≧3 | 40 |
| | | | | aroF | | | | | |
| BX_00301.0 | Kan 20 μg/mL | BW25113 | wild type | pSmart-LC-Kan-folA- | A | 35 | <0.1 | ≧3 | 40 |
| | | | | C1 | | | | | |
| BX_00302.0 | Kan 20 μg/mL | BW25113 | wild type | pSmart-LC-Kan-folA- | A | 30 | <0.1 | ≧3 | 20 |
| | | | | ORF | | | | | |
| BX_00304.0 | Kan 20 μg/mL | BW25113 | wild type | pSmart-LC-Kan- | A | 35 | <0.1 | ≧3 | 40 |
| | | | | menA-ORF | | | | | |
| BX_00305.0 | Kan 20 μg/mL | BW25113 | wild type | pSmart-LC-Kan- | A | 35 | <0.1 | ≧3 | 40 |
| | | | | pheA-C1 | | | | | |
| BX_00307.0 | Kan 20 μg/mL | BW25113 | wild type | pSmart-LC-Kan-tyrA- | A | 35 | <0.1 | ≧3 | 40 |
| | | | | C1 | | | | | |
| BX_00309.0 | Kan 20 μg/mL | BW25113 | wild type | pSmart-LC-Kan- | C | 35 | <0.1 | ≧3 | 40 |
| | | | | cynTS | | | | | |
| BX_00310.0 | Kan 20 μg/mL | BW25113 | wild type | pSmart-LC-Kan-glyA | B | 35 | <0.1 | ≧3 | 40 |
| BX_00312.0 | Kan 20 μg/mL | BW25113 | wild type | pSmart-LC-Kan-serA | B | 35 | <0.1 | ≧3 | 40 |
| BX_00313.0 | Kan 20 μg/mL | BW25113 | wild type | pSmart-LC-Kan-folD | A | 30 | <0.1 | ≧3 | 20 |
| BX_00314.0 | Kan 20 μg/mL | BW25113 | wild type | pSmart-LC-Kan-aroE | A | 35 | <0.1 | ≧3 | 40 |
| BX_00315.0 | Kan 20 μg/mL | BW25113 | wild type | pSmart-LC-Kan- | A | 35 | <0.1 | ≧3 | 40 |
| | | | | aroKB C1 | | | | | |
| BX_00317.0 | Kan 20 μg/mL | BW25113 | wild type | pSmart-LC-Kan-ilvA | B | 35 | <0.1 | ≧3 | 40 |
| | | | | operon | | | | | |
| BX_00318.0 | Kan 20 μg/mL | BW25113 | wild type | pSmart-LC-Kan-cysM | B | 35 | <0.1 | ≧3 | 40 |
| BX_00352.0 | Amp 100 μg/mL | BW25113 | wild type | pSmart-LC-Kan-metC | B | 35 | <0.1 | ≧3 | 40 |
| | | | | C1 | | | | | |
| BX_00387.0 | Kan (20 μg/mL) | BW25113 | ΔlysR::frt | pSmart-LC-Kan- | A | 35 | <0.1 | ≧3 | 40 |
| | | | | menA-ORF | | | | | |
| BX_00002.0 | Amp (100 μg/mL) | BW25113 | wild type | pKK223-mcs1 | None | 20 | <0.1 | ≧3 | — |
| BX_00319.0 | Amp 100 μg/mL + | BW25113 | wild type | pK223-aroH | A | 30 | <0.1 | ≧3 | 50 |
| | 1 mM IPTG | | | | | | | | |
| BX_00320.0 | Amp 100 μg/mL + | BW25113 | wild type | pK223-metE C645A | B | 35 | <0.1 | ≧3 | 75 |
| | 1 mM IPTG | | | | | | | | |
| BX_00321.0 | Amp 100 μg/mL + | BW25113 | wild type | pK223-ct-his-thrA | B | 35 | <0.1 | ≧3 | 75 |
| | 1 mM IPTG | | | | | | | | |
| BX_00357.0 | Amp 100 μg/mL + | BW25113 | wild type | pKK223-aroH*445 | A | 30 | <0.1 | ≧3 | 50 |
| | 1 mM IPTG | | | | | | | | |
| BX_00358.0 | Amp 100 μg/mL + | BW25113 | wild type | pKK223-aroH*447 | A | 35 | <0.1 | ≧3 | 75 |
| | 1 mM IPTG | | | | | | | | |
| BX_00359.0 | Amp 100 μg/mL + | BW25113 | wild type | pKK223-aroH*457 | A | 35 | <0.1 | ≧3 | 75 |
| | 1 mM IPTG | | | | | | | | |
| BX_00118.0 | Kan (20 μg/mL) | BW25113 | wild type | pJ251 | None | 25 | <0.1 | ≧3 | — |
| BX_00322.0 | Kan 20 μg/mL | BW25113 | wild type | pJ61-speFED | C | 35 | <0.1 | ≧3 | 40 |
| BX_00323.0 | Kan 20 μg/mL | BW25113 | wild type | pJ61-aroG | A | 35 | <0.1 | ≧3 | 40 |
| BX_00324.0 | Kan 20 μg/mL | BW25113 | wild type | pJ61-thrA | B | 35 | <0.1 | ≧3 | 40 |
| BX_00325.0 | Kan 20 μg/mL | BW25113 | wild type | pJ61-asd | B | 35 | <0.1 | ≧3 | 40 |
| BX_00326.0 | Kan 20 μg/mL | BW25113 | wild type | pJ61-ilvA | B | 35 | <0.1 | ≧3 | 40 |
| BX_00327.0 | Kan 20 μg/mL | BW25113 | wild type | pJ61-cysM | B | 35 | <0.1 | ≧3 | 40 |
| BX_00361.0 | Kan 20 μg/mL | BW25113 | wild type | pACYC177 (Kan | C | 35 | <0.1 | ≧3 | 40 |
| | | | | only)-cynTS | | | | | |
| BX_00362.0 | Kan 20 μg/mL + 1 mM | BW25113 | wild type | pACYC177 (Kan | A | 30 | <0.1 | ≧3 | 20 |
| | IPTG | | | only)-aroH | | | | | |
| BX_00363.0 | Kan 20 μg/mL | BW25113 | wild type | pACYC177 (kan only)- | C | 35 | <0.1 | ≧3 | 40 |
| | | | | speB | | | | | |
| BX_00364.0 | Kan 20 μg/mL + 1 mM | BW25113 | wild type | pACYC177 (Kan | B | 35 | <0.1 | ≧3 | 40 |
| | IPTG | | | only)-metE | | | | | |
| | | | | (Version1) | | | | | |
| | | | | (SS090608_13) | | | | | |
| BX_00365.0 | Kan 20 μg/mL | BW25113 | wild type | pACYC177 (Kan | B | 35 | <0.1 | ≧3 | 40 |
| | | | | only)-metC | | | | | |
| | | | | (Version1) | | | | | |
| | | | | (SS090608_17) | | | | | |
| BX_00144.0 | Amp (100 μg/mL) | BW25113 | wild type | pSmart-HC-Amp | None | 25 | <0.1 | ≧3 | — |
| BX_00334.0 | Amp 100 μg/mL | BW25113 | wild type | pSmart-HC-Amp- | D | 40 | <0.1 | ≧3 | 60 |
| | | | | cadA | | | | | |
| BX_00335.0 | Amp 100 μg/mL | BW25113 | wild type | pSmart-HC-Amp-prs | E | 35 | <0.1 | ≧3 | 40 |
| BX_00336.0 | Amp 100 μg/mL | BW25113 | wild type | pSmart-HC-Amp- | E | 35 | <0.1 | ≧3 | 40 |
| | | | | nrdAB | | | | | |
| BX_00337.0 | Amp 100 μg/mL | BW25113 | wild type | pSmart-HC-Amp- | E | 35 | <0.1 | ≧3 | 40 |
| | | | | nrdEF | | | | | |
| BX_00353.0 | Amp 100 μg/mL | BW25113 | wild type | pSmart-HC-Amp- | B | 45 | <0.1 | ≧3 | 80 |
| | | | | metC | | | | | |
| BX_00354.0 | Amp 100 μg/mL | BW25113 | wild type | pSmart-HC-Amp- | C | 45 | <0.1 | ≧3 | 80 |
| | | | | cynTS | | | | | |
| BX_00356.0 | Amp 100 μg/mL | BW25113 | wild type | pSmart-HC-Amp- | D | 30 | <0.1 | ≧3 | 20 |
| | | | | LysA | | | | | |
| BX_00419.0 | Amp (100 μg/mL) | BW25113 | ΔlysR::frt | pSmart-HC-Amp-prs | D, E | 30 | <0.1 | ≧3 | 20 |
| BX_00420.0 | Amp (100 μg/mL) | BW25113 | ΔlysR::frt | pSmart-HC-Amp- | D, E | 45 | <0.1 | ≧3 | 80 |
| | | | | nrdAB | | | | | |
| BX_00421.0 | Amp (100 μg/mL) | BW25113 | ΔlysR::frt | pSmart-HC-Amp- | D, E | 30 | <0.1 | ≧3 | 20 |
| | | | | nrdEF | | | | | |
| BX_00425.0 | Amp (100 μg/mL) | BW25113 | ΔnrdR::frt | pSmart-HC-Amp- | D, E | 35 | <0.1 | ≧3 | 40 |
| | | | | dapA | | | | | |
| BX_00426.0 | Amp (100 μg/mL) | BW25113 | ΔnrdR::frt | pSmart-HC-Amp- | D, E | 45 | <0.1 | ≧3 | 80 |
| | | | | cadA | | | | | |
| BX_00437.0 | Amp (100 μg/mL) | BW25113 | ΔlysR::frt | pSmart-HC-Amp- | B, D | 30 | <0.1 | ≧3 | 20 |
| | | | | metC | | | | | |
| BX_00438.0 | Amp (100 μg/mL) | BW25113 | ΔnrdR::frt | pSmart-HC-amp-metC | B, D | 35 | <0.1 | ≧3 | 40 |
| BW25113 | M9 | none | none | none | None | 27.5 | <0.1 | ≧3 | — |
| BX_00341.0 | none | BW25113 | ΔtyrR::frt | none | A | 40 | <0.1 | ≧3 | 45 |
| BX_00342.0 | none | BW25113 | ΔtrpR::frt | none | A | 35 | <0.1 | ≧3 | 27 |
| BX_00345.0 | none | BW25113 | ΔmetJ::frt | none | B | 35 | <0.1 | ≧3 | 27 |
| BX_00347.0 | none | BW25113 | ΔpurR::frt | none | C | 35 | <0.1 | ≧3 | 27 |
| BX_00348.0 | none | BW25113 | ΔlysR::frt | none | D | 35 | <0.1 | ≧3 | 27 |
| BX_00349.0 | none | BW25113 | ΔnrdR::frt | none | E | 35 | <0.1 | ≧3 | 27 |
| BX_00003.0 | Cm (20 μg/mL) | BW25113 | wild type | pBT-3 | None | 25 | <0.1 | ≧3 | — |
| BX_00368.0 | Cm (20 μg/mL) | BW25113 | wild type | pBT-3-cynTS | C | 30 | <0.1 | ≧3 | 20 |
| BX_00370.0 | Cm (20 μg/mL) | BW25113 | wild type | pBT-3-speB | C | 30 | <0.1 | ≧3 | 20 |
| BX_00142.0 | Kan (20 μg/mL), | BW25113 | wild type | pSmart-LC-kan, pBT-3 | None | 20 | <0.1 | ≧3 | — |
| | Cm (20 μg/mL) | | | | | | | | |
| BX_00463.0 | Cm (20 μg/mL)/ | BW25113 | ΔnrdR::frt | pBT-3-aroH*, pSmart- | A, C, E | 30 | <0.1 | ≧3 | 50 |
| | Kan (20 μg/mL) + | | | LC-Kan cynTS | | | | | |
| | 1 mM IPTG | | | | | | | | |
| BX_00468.0 | Cm (20 μg/mL)/ | BW25113 | ΔnrdR::frt | pSmart-LC-Kan-metC, | B, C, E | 30 | <0.1 | ≧3 | 50 |
| | Kan (20 μg/mL) | | | pBT3-cynTS | | | | | |

TABLE 45
E. coli Genetic Modification Results under Anaerobic Conditions

| | | | | | | | | | % |
|---|---|---|---|---|---|---|---|---|---|
| | | | Chromosomal | Vector based | | MIC Assay | | | Increase |
| | | | Genetic | Genetic | Tolerance | Result | P- | MIC Assay | Over |
| Strain Name | Media (M9 +) | Parent | Modifications | Modifications | Group | (g/L 3-HP) | value | Number | Control |
| BX_00138.0 | Kan (20 μg/mLl) | BW25113 | wild type | pSmart-LC-Kan | None | 25 | <0.1 | ≧3 | — |
| BX_00311.0 | Kan 20 μg/mL | BW25113 | wild type | pSmart-LC-Kan- | B | 30 | <0.1 | ≧3 | 20 |
| | | | | glyA-ORF | | | | | |
| BX_00002.0 | Amp (100 μg/mL) | BW25113 | wild type | pKK223-mcs1 | None | 15 | <0.1 | ≧3 | — |
| BX_00319.0 | Amp 100 μg/mL + | BW25113 | wild type | pK223-aroH | A | 20 | <0.1 | ≧3 | 33 |
| | 1 mM IPTG | | | | | | | | |
| BX_00320.0 | Amp 100 μg/mL + | BW25113 | wild type | pK223-metE C645A | B | 20 | <0.1 | ≧3 | 33 |
| | 1 mM IPTG | | | | | | | | |
| BX_00321.0 | Amp 100 μg/mL + | BW25113 | wild type | pK223-ct-his-thrA | B | 20 | <0.1 | ≧3 | 33 |
| | 1 mM IPTG | | | | | | | | |
| BX_00357.0 | Amp 100 μg/mL + | BW25113 | wild type | pKK223-aroH*445 | B | 20 | <0.1 | ≧3 | 33 |
| | 1 mM IPTG | | | | | | | | |
| BX_00358.0 | Amp 100 μg/mL + | BW25113 | wild type | pKK223-aroH*447 | A | 20 | <0.1 | ≧3 | 33 |
| | 1 mM IPTG | | | | | | | | |
| BX_00359.0 | Amp 100 μg/mL + | BW25113 | wild type | pKK223-aroH*457 | A | 20 | <0.1 | ≧3 | 33 |
| | 1 mM IPTG | | | | | | | | |
| BX_00118.0 | Kan (20 μg/mL) | BW25113 | wild type | pJ251 | None | 15 | <0.1 | ≧3 | — |
| BX_00322.0 | Kan 20 μg/mL | BW25113 | wild type | pJ61-speFED | C | 25 | <0.1 | ≧3 | 67 |
| BX_00323.0 | Kan 20 μg/mL | BW25113 | wild type | pJ61-aroG | A | 20 | <0.1 | ≧3 | 33 |
| BX_00324.0 | Kan 20 μg/mL | BW25113 | wild type | pJ61-thrA | B | 20 | <0.1 | ≧3 | 33 |
| BX_00325.0 | Kan 20 μg/mL | BW25113 | wild type | pJ61-asd | B | 20 | <0.1 | ≧3 | 33 |
| BX_00326.0 | Kan 20 μg/mL | BW25113 | wild type | pJ61-ilvA | B | 20 | <0.1 | ≧3 | 33 |
| BX_00327.0 | Kan 20 μg/mL | BW25113 | wild type | pJ61-cysM | B | 20 | <0.1 | ≧3 | 33 |
| BX_00360.0 | Kan 20 μg/mL | BW25113 | wild type | pACYC177 (Kan | C | 20 | <0.1 | ≧3 | 33 |
| | | | | only)-cynTS | | | | | |
| BX_00362.0 | Kan 20 μg/mL + 1 mM | BW25113 | wild type | pACYC177 (Kan | A | 20 | <0.1 | ≧3 | 33 |
| | IPTG | | | only)-aroH | | | | | |
| BX_00363.0 | Kan 20 μg/mL | BW25113 | wild type | pACYC177 (Kan | C | 20 | <0.1 | ≧3 | 33 |
| | | | | only)-speB | | | | | |
| BX_00364.0 | Kan 20 μg/mL + 1 mM | BW25113 | wild type | pACYC177 (Kan | B | 20 | <0.1 | ≧3 | 33 |
| | IPTG | | | only)-metE | | | | | |
| BX_00365.0 | Kan 20 μg/mL | BW25113 | wild type | pACYC177 (Kan | B | 20 | <0.1 | ≧3 | 33 |
| | | | | only)-metC | | | | | |
| BX_00144.0 | Amp (100 μg/mL) | BW25113 | wild type | pSmart-HC-Amp | None | 25 | <0.1 | ≧3 | — |
| BX_00426.0 | Amp (100 μg/mL) | BW25113 | ΔnrdR::frt | pSmart-HC-Amp- | D, E | 26.7 | <0.1 | ≧3 | 7 |
| | | | | cadA | | | | | |
| BX_00003.0 | Cm (20 μg/mL) | BW25113 | wild type | pBT-3 | None | 15 | <0.1 | ≧3 | — |
| BX_00368.0 | Cm (20 μg/mL) | BW25113 | wild type | pBT-3-cynTS | C | 20 | <0.1 | ≧3 | 33 |

### Example 49

### Evaluation of 3HPTGC-Related Supplements on Wild-Type E. coli

[0715] The effect of supplementation on 3HP tolerance was determined by MIC evaluations using the methods described in the Common Methods Section. Supplements tested are listed in Table 46. Results of the MIC evaluations are provided in Table 47 for aerobic condition and Table 48 for anaerobic condition. This data, which includes single and multiple-supplement additions, demonstrates improvement in 3-HP tolerance in these culture systems based on 24-hour MIC evaluations.

TABLE 46

| | | TGC | Concentration, | |
|---|---|---|---|---|
| Supplement | Source | Group | g/L | Note |
| Tyrosine | Sigma, | A | 0.036 | dissolve in |
| | St. Louis, MO | | | 0.01 |
| | | | | KOH, pH |
| | | | | final to 7 |
| Phenylalanine | Sigma, | A | 0.0664 | |
| | St. Louis, MO | | | |
| Tryptophan | Sigma, | A | 0.0208 | |
| | St. Louis, MO | | | |
| Shikimate | Sigma, | A | 0.1 | |
| | St. Louis, MO | | | |
| p-amino- | MP Biomedicals, | A | 0.069 | |
| benzoate | Aurora, OH | | | |
| Dihydroxy- | Sigma, | A | 0.077 | |
| benzoate | St. Louis, MO | | | |
| Tetra- | Sigma, | A | 0.015 | 10% DMSO |
| hydrofolate | St. Louis, MO | | | |
| Homocysteine | MP Biomedicals, | B | 0.008 | |
| | Aurora, OH | | | |
| Isoleucine | Sigma, | B | 0.0052 | |
| | St. Louis, MO | | | |
| Serine | Sigma, | B | 1.05 | |
| | St. Louis, MO | | | |
| Glycine | Fisher Scientific, | B | 0.06 | |
| | Fair Lawn, NJ | | | |
| Methionine | Sigma, | B | 0.03 | |
| | St. Louis, MO | | | |
| Threonine | Sigma, | B | 0.0476 | |
| | St. Louis, MO | | | |
| 2-oxobutyrate | Fluka | B | 0.051 | |
| | Biochemika, | | | |
| | Hungary | | | |
| Homoserine | Acros Organics, | B | 0.008 | |
| | NJ | | | |
| Aspartate | Sigma, | B | 0.0684 | |
| | St. Louis, MO | | | |
| Putrescine | MP Biomedicals, | C | 0.9 | |
| | Salon, OH | | | |
| Cadaverine | MP Biomedicals, | C | 0.6 | |
| | Salon, OH | | | |
| Spermidine | MP Biomedicals, | C | 0.5 | |
| | Salon, OH | | | |
| Ornithine | Sigma, | C | 0.2 | |
| | St. Louis, MO | | | |
| Citrulline | Sigma, | C | 0.2 | |
| | St. Louis, MO | | | |
| Bicarbonate | Fisher Scientific, | C | 1 | |
| | Fair Lawn, NJ | | | |
| Glutamine | Sigma, | C | 0.09 | dissolve in |
| | St. Louis, MO | | | 1M HCl, pH |
| | | | | final to 7 |
| Lysine | Sigma, | D | 0.0732 | |
| | St. Louis, MO | | | |
| Uracil | Sigma, | E | 0.224 | |
| | St. Louis, MO | | | |
| Citrate | Fisher Scientific, | F | 2 | |
| | Fair Lawn, NJ | | | |
| Chorismate | See above | A | See respective | |
| Group Mix | | | concentrations | |
| (includes all | | | above | |
| Group A | | | | |
| supplements | | | | |
| listed above) | | | | |
| Homocysteine | See above | B | See respective | |
| Group Mix | | | concentrations | |
| (includes all | | | above | |
| Group B | | | | |
| supplements | | | | |
| listed above) | | | | |
| Polyamine | See above | C | See respective | |
| Group Mix | | | concentrations | |
| (includes all | | | above | |
| Group C | | | | |
| supplements | | | | |
| listed above) | | | | |

TABLE 47
E. coli Supplement Results under Aerobic Conditions

| | | | | | | | % |
|---|---|---|---|---|---|---|---|
| | | | | average MIC | | MIC | Increase |
| | Strain | | | Assay Result | | Assay | Over |
| | Name | Media | Supplements (Group) | (g/L 3-HP) | P-value | Number | Control |
| CONTROLS | BW25113 | M9 | none | 28 | <0.1 | ≧3 | — |
| | BW25113 | EZ Rich | none | 75 | <0.1 | ≧3 | 173 |
| | BW25113 | M9 | Phenylalanine (A) | 32 | <0.1 | ≧3 | 17 |
| | BW25113 | M9 | Shikimate (A) | 28 | <0.1 | ≧3 | 3 |
| | BW25113 | M9 | p-aminobenzoate (A) | 35 | <0.1 | ≧3 | 27 |
| | BW25113 | M9 | Dihydroxybenzoate (A) | 35 | <0.1 | ≧3 | 27 |
| | BW25113 | M9 | Tetrahydrofolate (A) | 30 | <0.1 | ≧3 | 9 |
| | BW25113 | M9 | Chorismate Group Mix (A) | 30 | <0.1 | ≧3 | 9 |
| | BW25113 | M9 | Homocysteine (B) | 30 | <0.1 | ≧3 | 9 |
| | BW25113 | M9 | Isoleucine (B) | 32 | <0.1 | ≧3 | 17 |
| | BW25113 | M9 | Serine (B) | 32 | <0.1 | ≧3 | 17 |
| | BW25113 | M9 | Glycine (B) | 28 | <0.1 | ≧3 | 3 |
| | BW25113 | M9 | Methionine (B) | 38 | <0.1 | ≧3 | 36 |
| | BW25113 | M9 | Threonine (B) | 32 | <0.1 | ≧3 | 17 |
| | BW25113 | M9 | Homoserine (B) | 35 | <0.1 | ≧3 | 27 |
| | BW25113 | M9 | Homocysteine Group Mix (B) | 40 | <0.1 | ≧3 | 45 |
| | BW25113 | M9 | Putrescine (C) | 30 | <0.1 | ≧3 | 9 |
| | BW25113 | M9 | Cadaverine (C) | 35 | <0.1 | ≧3 | 27 |
| | BW25113 | M9 | Spermidine (C) | 40 | <0.1 | ≧3 | 45 |
| | BW25113 | M9 | Ornithine (C) | 30 | <0.1 | ≧3 | 9 |
| | BW25113 | M9 | Citrulline (C) | 30 | <0.1 | ≧3 | 9 |
| | BW25113 | M9 | Bicarbonate (C) | 44 | <0.1 | ≧3 | 59 |
| | BW25113 | M9 | Glutamine (C) | 30 | <0.1 | ≧3 | 9 |
| | BW25113 | M9 | Polyamine Group Mix (C) | 57 | <0.1 | ≧3 | 106 |
| | BW25113 | M9 | Lysine (D) | 37 | <0.1 | ≧3 | 33 |
| Double Supplements | BW25113 | M9 | Tyrosine (A), Homocysteine (B) | 35 | <0.1 | ≧3 | 27 |
| | BW25113 | M9 | Tyrosine (A), Methionine (B) | 30 | <0.1 | ≧3 | 9 |
| | BW25113 | M9 | Tyrosine (A), Isoleucine (B) | 30 | <0.1 | ≧3 | 9 |
| | BW25113 | M9 | Tyrosine (A), Putrescine (C) | 40 | <0.1 | ≧3 | 45 |
| | BW25113 | M9 | Tyrosine (A), Spermidine (C) | 40 | <0.1 | ≧3 | 45 |
| | BW25113 | M9 | Tyrosine (A), Ornithine (C) | 30 | <0.1 | ≧3 | 9 |
| | BW25113 | M9 | Tyrosine (A), Bicarbonate (C) | 35 | <0.1 | ≧3 | 27 |
| | BW25113 | M9 | Tyrosine (A), Lysine (D) | 30 | <0.1 | ≧3 | 9 |
| | BW25113 | M9 | Tyrosine (A), Citrate (F) | 35 | <0.1 | ≧3 | 27 |
| | BW25113 | M9 | Shikimate (A), Methionine (B) | 30 | <0.1 | ≧3 | 9 |
| | BW25113 | M9 | Shikimate (A), Bicarbonate (C) | 30 | <0.1 | ≧3 | 9 |
| | BW25113 | M9 | Shikimate (A), Uracil (E) | 30 | <0.1 | ≧3 | 9 |
| | BW25113 | M9 | Tetrahydrofolate (A), Methionine | 30 | <0.1 | ≧3 | 9 |
| | | | (B) | | | | |
| | BW25113 | M9 | Tetrahydrofolate (A), Homocysteine | 30 | <0.1 | ≧3 | 9 |
| | | | (B) | | | | |
| | BW25113 | M9 | Tetrahydrofolate (A), Putrescine (C) | 35 | <0.1 | ≧3 | 27 |
| | BW25113 | M9 | Tetrahydrofolate (A), Spermidine | 40 | <0.1 | ≧3 | 45 |
| | | | (C) | | | | |
| | BW25113 | M9 | Tetrahydrofolate (A), Ornithine (C) | 35 | <0.1 | ≧3 | 27 |
| | BW25113 | M9 | Tetrahydrofolate (A), Bicarbonate | 30 | <0.1 | ≧3 | 9 |
| | | | (C) | | | | |
| | BW25113 | M9 | Tetrahydrofolate (A), Uracil (E) | 30 | <0.1 | ≧3 | 9 |
| | BW25113 | M9 | Tetrahydrofolate (A), Citrate (F) | 30 | <0.1 | ≧3 | 9 |
| | BW25113 | M9 | Methionine (B), Putrescine (C) | 47 | <0.1 | ≧3 | 70 |
| | BW25113 | M9 | Methionine (B), Spermidine (C) | 40 | <0.1 | ≧3 | 45 |
| | BW25113 | M9 | Methionine (B), Ornithine (C) | 45 | <0.1 | ≧3 | 64 |
| | BW25113 | M9 | Methionine (B), Bicarbonate (C) | 35 | <0.1 | ≧3 | 27 |
| | BW25113 | M9 | Methionine (B), Lysine (D) | 30 | <0.1 | ≧3 | 9 |
| | BW25113 | M9 | Methionine (B), Uracil (E) | 35 | <0.1 | ≧3 | 27 |
| | BW25113 | M9 | Methionine (B), Citrate (F) | 30 | <0.1 | ≧3 | 9 |
| | BW25113 | M9 | Homocysteine (B), Putrescine (C) | 40 | <0.1 | ≧3 | 45 |
| | BW25113 | M9 | Homocysteine (B), Spermidine (C) | 45 | <0.1 | ≧3 | 64 |
| | BW25113 | M9 | Homocysteine (B), Ornithine (C) | 30 | <0.1 | ≧3 | 9 |
| | BW25113 | M9 | Homocysteine (B), Bicarbonate (C) | 42 | <0.1 | ≧3 | 52 |
| | BW25113 | M9 | Homocysteine (B), Lysine (D) | 35 | <0.1 | ≧3 | 27 |
| | BW25113 | M9 | Homocysteine (B), Uracil (E) | 30 | <0.1 | ≧3 | 9 |
| | BW25113 | M9 | Homocysteine (B), Citrate (F) | 30 | <0.1 | ≧3 | 9 |
| | BW25113 | M9 | Isoleucine (B), Putrescine (C) | 35 | <0.1 | ≧3 | 27 |
| | BW25113 | M9 | Isoleucine (B), Spermidine (C) | 35 | <0.1 | ≧3 | 27 |
| | BW25113 | M9 | Isoleucine (B), Bicarbonate (C) | 35 | <0.1 | ≧3 | 27 |
| | BW25113 | M9 | Isoleucine (B), Lysine (D) | 30 | <0.1 | ≧3 | 9 |
| | BW25113 | M9 | Isoleucine (B), Uracil (E) | 35 | <0.1 | ≧3 | 27 |
| | BW25113 | M9 | Isoleucine (B), Citrate (F) | 35 | <0.1 | ≧3 | 27 |
| | BW25113 | M9 | Putrescine (C), Lysine (D) | 42 | <0.1 | ≧3 | 52 |
| | BW25113 | M9 | Putrescine (C), Uracil (E) | 30 | <0.1 | ≧3 | 9 |
| | BW25113 | M9 | Putrescine (C), Citrate (F) | 30 | <0.1 | ≧3 | 9 |
| | BW25113 | M9 | Spermidine (C), Lysine (D) | 40 | <0.1 | ≧3 | 45 |
| | BW25113 | M9 | Spermidine (C), Uracil (E) | 30 | <0.1 | ≧3 | 9 |
| | BW25113 | M9 | Spermidine (C), Citrate (F) | 38 | <0.1 | ≧3 | 39 |
| | BW25113 | M9 | Ornithine (C), Lysine (D) | 32 | <0.1 | ≧3 | 15 |
| | BW25113 | M9 | Ornithine (C), Uracil (E) | 30 | <0.1 | ≧3 | 9 |
| | BW25113 | M9 | Ornithine (C), Citrate (F) | 30 | <0.1 | ≧3 | 9 |
| | BW25113 | M9 | Bicarbonate (C), Lysine (D) | 35 | <0.1 | ≧3 | 27 |
| | BW25113 | M9 | Bicarbonate (C), Uracil (E) | 35 | <0.1 | ≧3 | 27 |
| | BW25113 | M9 | Bicarbonate (C), Citrate (F) | 40 | <0.1 | ≧3 | 45 |
| | BW25113 | M9 | Lysine (D), Uracil (E) | 30 | <0.1 | ≧3 | 9 |
| | BW25113 | M9 | Lysine (D), Citrate (F) | 30 | <0.1 | ≧3 | 9 |
| Triple Supplements | BW25113 | M9 | Tyrosine (A), Methionine (B), | 35 | <0.1 | ≧3 | 27 |
| | | | Putrescine (C) | | | | |
| | BW25113 | M9 | Tyrosine (A), Methionine (B), | 35 | <0.1 | ≧3 | 27 |
| | | | Spermidine (C) | | | | |
| | BW25113 | M9 | Tyrosine (A), Methionine (B), | 30 | <0.1 | ≧3 | 9 |
| | | | Bicarbonate (C) | | | | |
| | BW25113 | M9 | Tyrosine (A), Methionine (B), | 30 | <0.1 | ≧3 | 9 |
| | | | Lysine (D) | | | | |
| | BW25113 | M9 | Tyrosine (A), Methionine (B), Uracil | 40 | <0.1 | ≧3 | 45 |
| | | | (E) | | | | |
| | BW25113 | M9 | Tyrosine (A), Methionine (B), | 30 | <0.1 | ≧3 | 9 |
| | | | Citrate (F) | | | | |
| | BW25113 | M9 | Tyrosine (A), Putrescine (C), | 30 | <0.1 | ≧3 | 9 |
| | | | Homocysteine (B) | | | | |
| | BW25113 | M9 | Tyrosine (A), Putrescine (C), | 28 | <0.1 | ≧3 | 3 |
| | | | Isoleucine (B) | | | | |
| | BW25113 | M9 | Tyrosine (A), Putrescine (C), Lysine | 35 | <0.1 | ≧3 | 27 |
| | | | (D) | | | | |
| | BW25113 | M9 | Tyrosine (A), Putrescine (C), Uracil | 30 | <0.1 | ≧3 | 9 |
| | | | (E) | | | | |
| | BW25113 | M9 | Tyrosine (A), Spermidine (C), | 30 | <0.1 | ≧3 | 9 |
| | | | Homocysteine (B) | | | | |
| | BW25113 | M9 | Tyrosine (A), Spermidine (C), | 30 | <0.1 | ≧3 | 9 |
| | | | Isoleucine (B) | | | | |
| | BW25113 | M9 | Tyrosine (A), Spermidine (C), | 30 | <0.1 | ≧3 | 9 |
| | | | Lysine (D) | | | | |
| | BW25113 | M9 | Tyrosine (A), Spermidine (C), Uracil | 35 | <0.1 | ≧3 | 27 |
| | | | (E) | | | | |
| | BW25113 | M9 | Tyrosine (A), Spermidine (C), | 30 | <0.1 | ≧3 | 9 |
| | | | Citrate (F) | | | | |
| | BW25113 | M9 | Tyrosine (A), Bicarbonate (C), | 35 | <0.1 | ≧3 | 27 |
| | | | Homocysteine (B) | | | | |
| | BW25113 | M9 | Tyrosine (A), Bicarbonate (C), | 35 | <0.1 | ≧3 | 27 |
| | | | Isoleucine (B) | | | | |
| | BW25113 | M9 | Tyrosine (A), Bicarbonate (C), | 45 | <0.1 | ≧3 | 64 |
| | | | Lysine (D) | | | | |
| | BW25113 | M9 | Tyrosine (A), Bicarbonate (C), | 45 | <0.1 | ≧3 | 64 |
| | | | Uracil (E) | | | | |
| | BW25113 | M9 | Tyrosine (A), Bicarbonate (C), | 40 | <0.1 | ≧3 | 45 |
| | | | Citrate (F) | | | | |
| | BW25113 | M9 | Shikimate (A), Putrescine (C), | 30 | <0.1 | ≧3 | 9 |
| | | | Homocysteine (B) | | | | |
| | BW25113 | M9 | Shikimate (A), Putrescine (C), Uracil | 30 | <0.1 | ≧3 | 9 |
| | | | (E) | | | | |
| | BW25113 | M9 | Shikimate (A), Putrescine (C), | 30 | <0.1 | ≧3 | 9 |
| | | | Methionine (B) | | | | |
| | BW25113 | M9 | Shikimate (A), Spermidine (C), | 30 | <0.1 | ≧3 | 9 |
| | | | Methionine (B) | | | | |
| | BW25113 | M9 | Shikimate (A), Uracil (C), | 30 | <0.1 | ≧3 | 9 |
| | | | Homocysteine (B) | | | | |
| | BW25113 | M9 | Shikimate (A), Uracil (C), Isoleucine | 30 | <0.1 | ≧3 | 9 |
| | | | (B) | | | | |
| | BW25113 | M9 | Shikimate (A), Uracil (C), | 35 | <0.1 | ≧3 | 27 |
| | | | Methionine (B) | | | | |
| | BW25113 | M9 | Shikimate (A), Uracil (C), Lysine | 30 | <0.1 | ≧3 | 9 |
| | | | (D) | | | | |
| | BW25113 | M9 | Shikimate (A), Uracil (C), Citrate (F) | 30 | <0.1 | ≧3 | 9 |
| | BW25113 | M9 | Methionine (B), Putrescine (C), | 35 | <0.1 | ≧3 | 27 |
| | | | Lysine (D) | | | | |
| | BW25113 | M9 | Methionine (B), Putrescine (C), | 35 | <0.1 | ≧3 | 27 |
| | | | Uracil (E) | | | | |
| | BW25113 | M9 | Methionine (B), Putrescine (C), | 35 | <0.1 | ≧3 | 27 |
| | | | Citrate (F) | | | | |
| | BW25113 | M9 | Methionine (B), Spermidine (C), | 45 | <0.1 | ≧3 | 64 |
| | | | Lysine (D) | | | | |
| | BW25113 | M9 | Methionine (B), Spermidine (C), | 35 | <0.1 | ≧3 | 27 |
| | | | Uracil (E) | | | | |
| | BW25113 | M9 | Methionine (B), Spermidine (C), | 40 | <0.1 | ≧3 | 45 |
| | | | Citrate (F) | | | | |
| | BW25113 | M9 | Methionine (B), Bicarbonate (C), | 45 | <0.1 | ≧3 | 64 |
| | | | Lysine (D) | | | | |
| | BW25113 | M9 | Methionine (B), Bicarbonate (C), | 45 | <0.1 | ≧3 | 64 |
| | | | Uracil (E) | | | | |
| | BW25113 | M9 | Methionine (B), Bicarbonate (C), | 45 | <0.1 | ≧3 | 64 |
| | | | Citrate (F) | | | | |
| | BW25113 | M9 | Methionine (B), Lysine (D), Uracil | 35 | <0.1 | ≧3 | 27 |
| | | | (E) | | | | |
| | BW25113 | M9 | Homocysteine (B), Bicarbonate (C), | 50 | <0.1 | ≧3 | 82 |
| | | | Lysine (D) | | | | |
| | BW25113 | M9 | Homocysteine (B), Bicarbonate (C), | 40 | <0.1 | ≧3 | 45 |
| | | | Uracil (E) | | | | |
| | BW25113 | M9 | Isoleucine (B), Putrescine (C), | 35 | <0.1 | ≧3 | 27 |
| | | | Lysine (D) | | | | |
| | BW25113 | M9 | Isoleucine (B), Putrescine (C), Uracil | 30 | <0.1 | ≧3 | 9 |
| | | | (E) | | | | |
| | BW25113 | M9 | Isoleucine (B), Putrescine (C), | 35 | <0.1 | ≧3 | 27 |
| | | | Citrate (F) | | | | |
| | BW25113 | M9 | Isoleucine (B), Bicarbonate (C), | 55 | <0.1 | ≧3 | 100 |
| | | | Lysine (D) | | | | |
| | BW25113 | M9 | Isoleucine (B), Bicarbonate (C), | 40 | <0.1 | ≧3 | 45 |
| | | | Uracil (E) | | | | |
| | BW25113 | M9 | Isoleucine (B), Bicarbonate (C), | 35 | <0.1 | ≧3 | 27 |
| | | | Citrate (F) | | | | |
| | BW25113 | M9 | Lysine (B), Bicarbonate (C), Uracil | 35 | <0.1 | ≧3 | 27 |
| | | | (E) | | | | |
| | BW25113 | M9 | Lysine (B), Bicarbonate (C), Citrate | 35 | <0.1 | ≧3 | 27 |
| | | | (F) | | | | |
| | BW25113 | M9 | Methionine (B), Putrescine (C), | 30 | <0.1 | ≧3 | 9 |
| | | | Lysine (D) | | | | |
| | BW25113 | M9 | Methionine (B), Bicarbonate (C), | 30 | <0.1 | ≧3 | 9 |
| | | | Lysine (D) | | | | |
| 4 Supplements | BW25113 | M9 | Tyrosine (A), Methionine (B), | 50 | <0.1 | ≧3 | 82 |
| | | | Putrescine (C), Lysine (D) | | | | |
| | BW25113 | M9 | Tyrosine (A), Methionine (B), | 40 | <0.1 | ≧3 | 45 |
| | | | Putrescine (C), Uracil (E) | | | | |
| | BW25113 | M9 | Tyrosine (A), Methionine (B), | 35 | <0.1 | ≧3 | 27 |
| | | | Putrescine (C), Citrate (F) | | | | |
| | BW25113 | M9 | Tyrosine (A), Methionine (B), | 40 | <0.1 | ≧3 | 45 |
| | | | Bicarbonate (C), Lysine (D) | | | | |
| | BW25113 | M9 | Tyrosine (A), Methionine (B), | 40 | <0.1 | ≧3 | 45 |
| | | | Bicarbonate (C), Uracil (E) | | | | |
| | BW25113 | M9 | Tyrosine (A), Methionine (B), | 45 | <0.1 | ≧3 | 64 |
| | | | Bicarbonate (C), Citrate (F) | | | | |
| | BW25113 | M9 | Tyrosine (A), Putrescine (C), | 40 | <0.1 | ≧3 | 45 |
| | | | Homocysteine (B), Lysine (D) | | | | |
| | BW25113 | M9 | Tyrosine (A), Putrescine (C), | 30 | <0.1 | ≧3 | 9 |
| | | | Homocysteine (B), Uracil (E) | | | | |
| | BW25113 | M9 | Tyrosine (A), Putrescine (C), | 35 | <0.1 | ≧3 | 27 |
| | | | Homocysteine (B), Citrate (F) | | | | |
| | BW25113 | M9 | Tyrosine (A), Bicarbonate (C), | 30 | <0.1 | ≧3 | 9 |
| | | | Homocysteine (B), Uracil (E) | | | | |
| | BW25113 | M9 | Tyrosine (A), Bicarbonate (C), | 35 | <0.1 | ≧3 | 27 |
| | | | Homocysteine (B), Citrate (F) | | | | |
| | BW25113 | M9 | Shikimate (A), Putrescine (C), | 30 | <0.1 | ≧3 | 9 |
| | | | Methionine (B), Lysine (D) | | | | |
| | BW25113 | M9 | Shikimate (A), Putrescine (C), | 35 | <0.1 | ≧3 | 27 |
| | | | Methionine (B), Uracil (E) | | | | |
| | BW25113 | M9 | Shikimate (A), Putrescine (C), | 30 | <0.1 | ≧3 | 9 |
| | | | Methionine (B), Citrate (F) | | | | |
| | BW25113 | M9 | Shikimate (A), Uracil (E), | 35 | <0.1 | ≧3 | 27 |
| | | | Methionine (B), Lysine (D) | | | | |
| | BW25113 | M9 | Shikimate (A), Uracil (E), | 35 | <0.1 | ≧3 | 27 |
| | | | Methionine (B), Bicarbonate (C) | | | | |
| | BW25113 | M9 | Shikimate (A), Uracil (E), | 30 | <0.1 | ≧3 | 9 |
| | | | Methionine (B), Citrate (F) | | | | |
| | BW25113 | M9 | Methionine (B), Putrescine (C), | 30 | <0.1 | ≧3 | 9 |
| | | | Lysine (D), Uracil (E) | | | | |
| | BW25113 | M9 | Methionine (B), Bicarbonate (C), | 30 | <0.1 | ≧3 | 9 |
| | | | Lysine (D), Uracil (E) | | | | |
| | BW25113 | M9 | Methionine (B), Bicarbonate (C), | 35 | <0.1 | ≧3 | 27 |
| | | | Lysine (D), Citrate (F) | | | | |
| | BW25113 | M9 | Bicarbonate (C), Lysine (D), Uracil | 30 | <0.1 | ≧3 | 9 |
| | | | (E), Citrate (F) | | | | |
| | BW25113 | M9 | Methionine (B), Lysine (D), Uracil | 35 | <0.1 | ≧3 | 27 |
| | | | (E), Citrate (F) | | | | |
| 5 supplements | BW25113 | M9 | Shikimate (A), Methionine (B), | 40 | <0.1 | ≧3 | 45 |
| | | | Bicarbonate (C), Lysine (D), Uracil | | | | |
| | | | (E) | | | | |
| | BW25113 | M9 | Shikimate (A), Homocsyteine (B), | 40 | <0.1 | ≧3 | 45 |
| | | | Bicarbonate (C), Lysine (D), Uracil | | | | |
| | | | (E) | | | | |
| | BW25113 | M9 | Tyrosine (A), Methionine (B), | 40 | <0.1 | ≧3 | 45 |
| | | | Bicarbonate (C), Lysine (D), Citrate | | | | |
| | | | (F) | | | | |
| | BW25113 | M9 | Shikimate (A), Methionine (B), | 40 | <0.1 | ≧3 | 45 |
| | | | Bicarbonate (C), Lysine (D), Citrate | | | | |
| | | | (F) | | | | |
| | BW25113 | M9 | Shikimate (A), Homocsyteine (B), | 40 | <0.1 | ≧3 | 45 |
| | | | Bicarbonate (C), Lysine (D), Citrate | | | | |
| | | | (F) | | | | |
| | BW25113 | M9 | Methionine (B), Bicarbonate (C), | 40 | <0.1 | ≧3 | 45 |
| | | | Lysine (D), Uracil (E), Citric (F) | | | | |
| | BW25113 | M9 | Tyrosine (A), Methionine (B), | 37 | <0.1 | ≧3 | 33 |
| | | | Bicarbonate (C), Lysine (D), Uracil | | | | |
| | | | (E) | | | | |
| | BW25113 | M9 | Tyrosine (A), Methionine (B), | 35 | <0.1 | ≧3 | 27 |
| | | | Putrescine (C), Lysine (D), Uracil | | | | |
| | | | (E) | | | | |
| | BW25113 | M9 | Shikimate (A), Methionine (B), | 35 | <0.1 | ≧3 | 27 |
| | | | Putrescine (C), Lysine (D), Uracil | | | | |
| | | | (E) | | | | |
| | BW25113 | M9 | Tyrosine (A), Homocysteine (B), | 35 | <0.1 | ≧3 | 27 |
| | | | Putrescine (C), Lysine (D), Uracil | | | | |
| | | | (E) | | | | |
| | BW25113 | M9 | Shikimate (A), Homocsyteine (B), | 35 | <0.1 | ≧3 | 27 |
| | | | Putrescine (C), Lysine (D), Uracil | | | | |
| | | | (E) | | | | |
| | BW25113 | M9 | Tyrosine (A), Methionine (B), | 35 | <0.1 | ≧3 | 27 |
| | | | Putrescine (C), Lysine (D), Citrate | | | | |
| | | | (F) | | | | |
| | BW25113 | M9 | Tyrosine (A), Homocysteine (B), | 35 | <0.1 | ≧3 | 27 |
| | | | Putrescine (C), Lysine (D), Citrate | | | | |
| | | | (F) | | | | |
| | BW25113 | M9 | Shikimate (A), Homocsyteine (B), | 35 | <0.1 | ≧3 | 27 |
| | | | Putrescine (C), Lysine (D), Citrate | | | | |
| | | | (F) | | | | |
| | BW25113 | M9 | Tyrosine (A), Homocysteine (B), | 35 | <0.1 | ≧3 | 27 |
| | | | Bicarbonate (C), Lysine (D), Citrate | | | | |
| | | | (F) | | | | |
| | BW25113 | M9 | Methionine (B), Spermidine (C), | 35 | <0.1 | ≧3 | 27 |
| | | | Lysine (D), Uracil (E), Citric (F) | | | | |
| | BW25113 | M9 | Methionine (B), Putrescine (C), | 35 | <0.1 | ≧3 | 27 |
| | | | Lysine (D), Uracil (E), Citric (F) | | | | |
| | BW25113 | M9 | Tyrosine (A), Bicarbonate (C), | 35 | <0.1 | ≧3 | 27 |
| | | | Lysine (D), Uracil (E), Citrate (F) | | | | |
| | BW25113 | M9 | Tyrosine (A), Methionine (B), | 35 | <0.1 | ≧3 | 27 |
| | | | Lysine (D), Uracil (E), Citrate (F) | | | | |
| | BW25113 | M9 | Shikimate (A), Methionine (B), | 35 | <0.1 | ≧3 | 27 |
| | | | Lysine (D), Uracil (E), Citrate (F) | | | | |
| | BW25113 | M9 | Shikimate (A), Putrescine (C), | 30 | <0.1 | ≧3 | 9 |
| | | | Lysine (D), Uracil (E), Citrate (F) | | | | |
| | BW25113 | M9 | Tyrosine (A), Homocysteine (B), | 38 | <0.1 | ≧3 | 39 |
| | | | Bicarbonate (C), Lysine (D), Uracil | | | | |
| | | | (E) | | | | |
| | BW25113 | M9 | Shikimate (A), Methionine (B), | 30 | <0.1 | ≧3 | 9 |
| | | | Putrescine (C), Lysine (D), Citrate | | | | |
| | | | (F) | | | | |
| 6 supplements | BW25113 | M9 | Tyrosine (A), Methionine (B), | 42 | <0.1 | ≧3 | 52 |
| | | | Putrescine (C), Lysine (D), Uracil | | | | |
| | | | (E), Citrate (F) | | | | |
| | BW25113 | M9 | Shikimate (A), Methionine (B), | 40 | <0.1 | ≧3 | 45 |
| | | | Bicarbonate (C), Lysine (D), Uracil | | | | |
| | | | (E), Citrate (F) | | | | |
| | BW25113 | M9 | Shikimate (A), Methionine (B), | 35 | <0.1 | ≧3 | 27 |
| | | | Putrescine (C), Lysine (D), Uracil | | | | |
| | | | (E), Citrate (F) | | | | |
| | BW25113 | M9 | Tyrosine (A), Methionine (B), | 37 | <0.1 | ≧3 | 33 |
| | | | Bicarbonate (C), Lysine (D), Uracil | | | | |
| | | | (E), Citrate (F) | | | | |

TABLE 48
E. coli Supplement Results under Anaerobic Conditions

| | | | | MIC Assay | | MIC | % Increase |
|---|---|---|---|---|---|---|---|
| | Strain | | | Result | | Assay | Over |
| | Name | Media | Supplements (Group) | (g/L 3-HP) | P-value | Number | Control |
| CONTROLS | BW25113 | M9 | none | 30.0 | <0.1 | ≧3 | — |
| | BW25113 | EZ Rich | none | 75.0 | <0.1 | ≧3 | 150 |
| Single Supplements | BW25113 | M9 | Phenylalanine (A) | 32.1 | <0.1 | ≧3 | 7 |
| | BW25113 | M9 | p-aminobenzoate (A) | 40.0 | <0.1 | ≧3 | 33 |
| | BW25113 | M9 | Dihydroxybenzoate (A) | 40.0 | <0.1 | ≧3 | 33 |
| | BW25113 | M9 | Tetrahydrofolate (A) | 40.0 | <0.1 | ≧3 | 33 |
| | BW25113 | M9 | Serine (B) | 32.1 | <0.1 | ≧3 | 7 |
| | BW25113 | M9 | Methionine (B) | 42.8 | <0.1 | ≧3 | 43 |
| | BW25113 | M9 | Homoserine (B) | 30.0 | <0.1 | ≧3 | 0 |
| | BW25113 | M9 | Homocysteine Group Mix (B) | 45.0 | <0.1 | ≧3 | 50 |
| | BW25113 | M9 | Putrescine(C) | 35.0 | <0.1 | ≧3 | 17 |
| | BW25113 | M9 | Spermidine (C) | 35.0 | <0.1 | ≧3 | 17 |
| | BW25113 | M9 | Polyamine Group Mix (C) | 60.0 | <0.1 | ≧3 | 100 |
| | BW25113 | M9 | Lysine (D) | 41.7 | <0.1 | ≧3 | 39 |
| Double Supplements | BW25113 | M9 | Tetrahydrofolate (A), Putrescine (C) | 35.0 | <0.1 | ≧3 | 17 |
| | BW25113 | M9 | Tetrahydrofolate (A), Spermidine (C) | 30.0 | <0.1 | ≧3 | 0 |
| | BW25113 | M9 | Tetrahydrofolate (A), Bicarbonate (C) | 35.0 | <0.1 | ≧3 | 17 |
| | BW25113 | M9 | Tetrahydrofolate (A), Lysine (D) | 35.0 | <0.1 | ≧3 | 17 |
| | BW25113 | M9 | Homocysteine (B), Bicarbonate (C) | 35.0 | <0.1 | ≧3 | 17 |
| | BW25113 | M9 | Putrescine (C), Lysine (D) | 30.0 | <0.1 | ≧3 | 0 |
| | BW25113 | M9 | Putrescine (C), Citrate (F) | 36.7 | <0.1 | ≧3 | 22 |
| Triple Supplements | BW25113 | M9 | Methionine (B), Spermidine (C), | 35.0 | <0.1 | ≧3 | 17 |
| | | | Lysine (D) | | | | |
| | BW25113 | M9 | Isolucine (B), Putrescine (C), Lysine | 35.0 | <0.1 | ≧3 | 17 |
| | | | (D) | | | | |
| 4 Supplements | | | | | <0.1 | ≧3 | |
| | BW25113 | M9 | Tyrosine (A), Methionine (B), | 40.0 | <0.1 | ≧3 | 33 |
| | | | Putrescine (C), Lysine (D) | | | | |
| | BW25113 | M9 | Tyrosine (A), Methionine (B), | 35.0 | <0.1 | ≧3 | 17 |
| | | | Bicarbonate (C), Lysine (D) | | | | |
| | BW25113 | M9 | Tyrosine (A), Methionine (B), | 35.0 | <0.1 | ≧3 | 17 |
| | | | Bicarbonate (C), Citrate (F) | | | | |

### Example 50

### Evaluation of 3HPTGC-Related Genetically Modified E. coli

[0716] Example 50 provides a direct comparison of one genetic modification of the 3HPTC with a control using a growth rate-based toleragram over a 24-hour period.

[0717] The effects of genetic modifications on 3HP tolerance were determined by MIC evaluations using the methods described in the Common Methods Section. Genetic modifications tested in E. coli and the MIC results thereof are listed in Table 44 for aerobic condition and Table 45 for anaerobic condition. This data, which includes single and multiple genetic modifications, demonstrates improvement in 3-HP tolerance in these culture systems based on 24-hour MIC evaluations.

### Example 51

### Toleragram Comparison with CynTS Genetic Modification

[0718] Twenty-four hour duration toleragram evaluations were conducted to compare a control (wild-type) E. coli (strain BW25113) with a genetically modified E. coli (strain BW25113) comprising a genetic modification to introduce cynTS.

[0719] Results are provided in the figures, which show the control strain also tested under indicated additional conditions.

[0720] Based on the area under the curve, the cynTS treatment is demonstrated to exhibit greater tolerance to 3-HP, at various elevated 3-HP concentrations, versus the control.

### Example 52

### Genetic Modification/Introduction of Tolerance Pieces into Bacillus subtilis

[0721] For creation of a 3-HP production tolerance pieces into Bacillus subtilis several genes from the E. coli toleragenic complex were cloned into a Bacillus shuttle vector, pWH1520 (SEQ ID NO:010) obtained from Boca Scientific (Boca Raton, Fla. USA). This shuttle vector carries an inducible Pxyl xylose-inducible promoter, as well as an ampicillin resistance cassette for propagation in E. coli and a tetracycline resistance cassette for propagation in Bacillus subtilis. Cloning strategies for these genes are shown in Table 49.

TABLE 49
B. subtilis Tolerance Plasmid Construction

| | | | | | PCRn | |
|---|---|---|---|---|---|---|
| | | | | | Sequence or | |
| | | | | | Codon | |
| Gene(s) | | | | | Optimized | |
| or Region | | Cloning | | | Sequence | Plasmid |
| Name | Vector | Method | Primer A | Primer B | (Region) | Name |
| speB | pWH1520 | A | SEQ ID. 0142 | SEQ ID. 0143 | SEQ ID. 0144 | pWH1520- |
| | | | | | | Pxyl:speB |
| metE | pWH1520 | A | SEQ ID 0145 | SEQ ID 0146 | SEQ ID 0147 | pWH1520- |
| | | | | | | Pxyl:metE |

[0722] Method A

[0723] Tolerance genes cloned for testing in B. subtilis designated a cloning method A in Table 49 were created in a similar manner. The cloning method described here places the gene under the xylose-inducible promoter. Each gene was amplified by polymerase chain reaction using their corresponding Primers A and Primer B listed in each row of the table. Primer A of each set contains homology to the start of the gene and a SpeI restriction site. Primer B contains homology for the region downstream of the stop codon of the gene and a BamHI restriction site. The polymerase chain reaction product was purified using a PCRn purification kit obtained from Qiagen Corporation (Valencia, Calif. USA) according to manufacturer's instructions. Next, the purified product was digested with SpeI and BamHI obtained from New England BioLabs (Ipswich, Mass. USA) according to manufacturer's instructions. The digestion mixture was separated by agarose gel electrophoresis, and visualized under UV transillumination as described in Subsection II of the Common Methods Section. An agarose gel slice containing a DNA piece corresponding to the digested and purified tolerance gene was cut from the gel and the DNA recovered with a standard gel extraction protocol and components from Qiagen (Valencia, Calif. USA) according to manufacturer's instructions.

[0724] This pWH1520 shuttle vector DNA was isolated using a standard miniprep DNA purification kit from Qiagen (Valencia, Calif. USA) according to manufacturer's instructions. The resulting DNA was restriction digested with SpeI and SphI obtained from New England BioLabs (Ipswich, Mass. USA) according to manufacturer's instructions. The digestion mixture was separated by agarose gel electrophoresis, and visualized under UV transillumination as described in Subsection II of the Common Methods Section. An agarose gel slice containing a DNA piece corresponding to digested pWH1520 backbone product was cut from the gel and the DNA recovered with a standard gel extraction protocol and components from Qiagen (Valencia, Calif. USA) according to manufacturer's instructions.

[0725] Both the digested and purified tolerance gene and pWH1520 DNA products were ligated together using T4 ligase obtained from New England BioLabs (Ipswich, Mass. USA) according to manufacturer's instructions. The ligation mixture was then transformed into chemically competent 10G E. coli cells obtained from Lucigen Corporation (Middleton Wis., USA) according to the manufacturer's instructions and plated LB plates augmented with ampicillin for selection. Several of the resulting colonies were cultured and their DNA was isolated using a standard miniprep DNA purification kit from Qiagen (Valencia, Calif. USA) according to manufacturer's instructions. The recovered DNA was checked by restriction digest followed by agarose gel electrophoresis. DNA samples showing the correct banding pattern were further verified by DNA sequencing.

### Example 53

### Genetic Modification/Introduction of Malonyl-CoA Reductase for 3-HP Production in Bacillus subtilis

[0726] For creation of a 3-HP production pathway in Bacillus Subtilis the codon optimized nucleotide sequence for the malonyl-coA reductase gene from Chloroflexus aurantiacus that was constructed by the gene synthesis service from DNA 2.0 (Menlo Park, Calif. USA), a commercial DNA gene synthesis provider, was added to a Bacillus Subtilis shuttle vector. This shuttle vector, pHT08 (SEQ ID NO:011), was obtained from Boca Scientific (Boca Raton, Fla. USA) and carries an inducible Pgrac IPTG-inducible promoter.

[0727] This mcr gene sequence was prepared for insertion into the pHT08 shuttle vector by polymerase chain reaction amplification with primer 1 (5′ GGAAGGATCCATGTCCGGTACGGGTCG-3′) (SEQ ID NO:148), which contains homology to the start site of the mcr gene and a BamHI restriction site, and primer 2 (5′-Phos-GGGATTAGACGGTAATCGCACGACCG-3′) (SEQ ID NO:149), which contains the stop codon of the mcr gene and a phosphorylated 5′ terminus for blunt ligation cloning. The polymerase chain reaction product was purified using a PCRn purification kit obtained from Qiagen Corporation (Valencia, Calif. USA) according to manufacturer's instructions. Next, the purified product was digested with BamHI obtained from New England BioLabs (Ipswich, Mass. USA) according to manufacturer's instructions. The digestion mixture was separated by agarose gel electrophoresis, and visualized under UV transillumination as described in Subsection II of the Common Methods Section. An agarose gel slice containing a DNA piece corresponding to the mcr gene was cut from the gel and the DNA recovered with a standard gel extraction protocol and components from Qiagen (Valencia, Calif. USA) according to manufacturer's instructions.

[0728] This pHT08 shuttle vector DNA was isolated using a standard miniprep DNA purification kit from Qiagen (Valencia, Calif. USA) according to manufacturer's instructions. The resulting DNA was restriction digested with BamHI and SmaI obtained from New England BioLabs (Ipswich, Mass. USA) according to manufacturer's instructions. The digestion mixture was separated by agarose gel electrophoresis, and visualized under UV transillumination as described in Subsection II of the Common Methods Section. An agarose gel slice containing a DNA piece corresponding to digested pHT08 backbone product was cut from the gel and the DNA recovered with a standard gel extraction protocol and components from Qiagen (Valencia, Calif. USA) according to manufacturer's instructions.

[0729] Both the digested and purified mcr and pHT08 products were ligated together using T4 ligase obtained from New England BioLabs (Ipswich, Mass. USA) according to manufacturer's instructions. The ligation mixture was then transformed into chemically competent 10G E. coli cells obtained from Lucigen Corporation (Middleton Wis., USA) according to the manufacturer's instructions and plated LB plates augmented with ampicillin for selection. Several of the resulting colonies were cultured and their DNA was isolated using a standard miniprep DNA purification kit from Qiagen (Valencia, Calif. USA) according to manufacturer's instructions. The recovered DNA was checked by restriction digest followed by agarose gel electrophoresis. DNA samples showing the correct banding pattern were further verified by DNA sequencing. The sequence verified DNA was designated as pHT08-mcr, and was then transformed into chemically competent Bacillus subtilis cells using directions obtained from Boca Scientific (Boca Raton, Fla. USA). Bacillus subtilis cells carrying the pHT08-mcr plasmid were selected for on LB plates augmented with chloramphenicol.

[0730] Bacillus subtilis cells carrying the pHT08-mcr, were grown overnight in 5 ml of LB media supplemented with 20 ug/mL chloramphenicol, shaking at 225 rpm and incubated at 37 degrees Celsius. These cultures were used to inoculate 1% v/v, 75 mL of M9 minimal media supplemented with 1.47 g/L glutamate, 0.021 g/L tryptophan, 20 ug/mL chloramphenicol and 1 mM IPTG. These cultures were then grown for 18 hours in a 250 mL baffled Erlenmeyer flask at 25 rpm, incubated at 37 degrees Celsius. After 18 hours, cells were pelleted and supernatants subjected to GCMS detection of 3-HP (described in Common Methods Section IIIb)). Trace amounts of 3-HP were detected with qualifier ions.

### Example 54

### Bacillus subtilis Strain Construction

[0731] Plasmids for tolerance genetic elements in pWH1520 and the production plasmid, pHT08-mcr, were transformed in to two Bacillus subtilis strains. The Bacillus subtilis subspecies subtilis 168 strain was obtained as a kind a gift from the laboratory of Prof. Ryan T. Gill from the University of Colorado at Boulder. Transformations were performed using a modified protocol developed from Anagnostopoulos and Spizizen (Requirements for transformation in Bacillus subtilis. J. Bacteriol. 81:741-746 (1961)) as provided with the instructions for the pHT08 shuttle vector by Boca Scientific (Boca Raton, Fla. USA).

### Example 55

### Evaluation of 3HPTGC-Related Supplements on Wild-Type B. subtilis

[0732] The effect of supplementation on 3HP tolerance was determined by MIC evaluations using the methods described in the Common Methods Section. Supplements tested are listed in the Supplements Table. Results of the MIC evaluations under anaerobic condition are provided in Table 50.

TABLE 50
B. subtilis Supplement and Genetic Modification Results under Aerobic Conditions

| | | | | | Chromosomal | Vector Based | | | % Increase |
|---|---|---|---|---|---|---|---|---|---|
| | | | Group | | Genetic | Genetic | Avg 24 hr | Standard | Over |
| Strain Name | Media | Supplements | Represented | Parent | Modifications | Modifications | ΔOD600 | Error | Control |
| B. subtilis 168 | M9 + glu + | none | none | NA | none | none | 0.04 | 0.004 | 0 |
| | trp* | | | | | | | | |
| B. subtilis 168 | M9 + glu + | Chorismate | A | NA | none | none | 0.26 | 0.043 | 577 |
| | trp | Group | | | | | | | |
| B. subtilis 168 | M9 + glu + | Homocysteine | B | NA | none | none | 0.08 | 0.005 | 104 |
| | trp | Group Mix | | | | | | | |
| B. subtilis 168 | M9 + glu + | Methionine | B | NA | none | none | 0.15 | 0.007 | 282 |
| | trp | | | | | | | | |
| B. subtilis 168 | M9 + glu + | Bicarbonate | C | NA | none | none | 0.06 | 0.002 | 56 |
| | trp | | | | | | | | |
| B. subtilis 168 | M9 + glu + | p- | A | NA | none | none | 0.07 | 0.015 | 89 |
| | trp | aminobenzoate | | | | | | | |
| B. subtilis 168 | M9 + glu + | spermidine | C | NA | none | none | 0.09 | 0.024 | 140 |
| | trp | | | | | | | | |
| B. subtilis 168 | M9 + glu + | Isoleucine, | B, C, D | NA | none | none | 0.05 | 0.006 | 29 |
| | trp | Bicarbonate, | | | | | | | |
| | | Lysine | | | | | | | |
| B. subtilis 168 | M9 + glu + | Citrate | F | NA | none | none | 0.30 | 0.046 | 674 |
| | trp | | | | | | | | |
| BSX_0003.0 | M9 + glu + | none | none | B. subtilis | none | pWH1520 | 0.00 | 0.000 | 0 |
| | trp + 1 mM | | | 168 | | | | | |
| | Xylose | | | | | | | | |
| BSX_0011.0 | M9 + glu + | none | C | B. subtilis | none | pWH1520-Pxyl: | 0.07 | 0.060 | ** |
| | trp + 1 mM | | | 168 | | speB region | | | |
| | Xylose | | | | | | | | |
| BSX_0015.0 | M9 + glu + | none | B | B. subtilis | none | pWH1520-Pxyl: | 0.06 | 0.063 | ** |
| | trp + 1 mM | | | 168 | | metE region | | | |
| | Xylose | | | | | | | | |

* M9 + glu + trp means M9 minimal + glutamate (1.47 g/L) and tryptophan (0.021 g/L)
** Genetically modified strains had a positive change in growth after 24 hours, compared to control BSX_0003.0 which had a decrease in OD600 after 34 hours resulting in a reading of 0.

### Example 56

### Evaluation of 3HPTGC-Related Genetically Modified B. Subtilis without and with 3HPTGC-Related Supplements

[0733] The effect of supplementation and/or genetic modifications on 3HP tolerance in B. subtilis was determined by MIC evaluations using the methods described in the Common Methods Section. Supplements tested are listed in the Supplements Table. Genetic modifications tested and the MIC results under aerobic condition for B. subtilis are provided in Table 50. This data, which includes single genetic modifications and single and multiple supplement additions, demonstrates improvement in 3-HP tolerance in this culture system based changes in OD.

### Example 57

### Yeast Aerobic Pathway for 3HP Production (Prophetic)

[0734] The following construct (SEQ ID NO:150) containing: 200 bp 5′ homology to ACC1, His3 gene for selection, Adh1 yeast promoter, BamHI and SpeI sites for cloning of MCR, cyc1 terminator, Tef1 promoter from yeast and the first 200 bp of homology to the yeast ACC1 open reading frame will be constructed using gene synthesis (DNA 2.0). The MCR open reading frame (SEQ ID NO:151) will be cloned into the BamHI and SpeI sites, this will allow for constitutive transcription by the adh1 promoter. Following the cloning of MCR into the construct the genetic element (SEQ ID NO:152) will be isolated from the plasmid by restriction digestion and transformed into relevant yeast strains. The genetic element will knock out the native promoter of yeast ACC1 and replace it with MCR expressed from the adh1 promoter and the Tef1 promoter will now drive yeast ACC1 expression. The integration will be selected for by growth in the absence of histidine. Positive colonies will be confirmed by PCRn. Expression of MCR and increased expression of ACC1 will be confirmed by RT-PCR.

[0735] An alternative approach that could be utilized to express MCR in yeast is expression of MCR from a plasmid. The genetic element containing MCR under the control of the ADH1 promoter (SEQ ID 4) could be cloned into a yeast vector such as pRS421 (SEQ ID NO:153) using standard molecular biology techniques creating a plasmid containing MCR (SEQ ID NO:154). A plasmid based MCR could then be transformed into different yeast strains.

[0736] Based on the present disclosure, it is noted that, in addition to introducing a nucleic acid construct that comprises a sequence encoding for malonyl-CoA reductase activity in a yeast cell, in some embodiments additional genetic modifications are made to decrease enoyl-CoA reductase activity and/or other fatty acid synthase activity.

### Example 58

### Cloning of Saccharomyces cerevisiae Genetic Elements for Increased Tolerance to 3HP

[0737] Yeast genes were identified by homology and pathway comparison using <<biocyc.org>>, outlined in FIG. 9D, sheets 1-7. Genetic elements were amplified by PCRn using the primers in Table 51. Yeast genetic elements were amplified to contain native promoters and 3′ untranslated region, PCRn product sequences Table 51. PCRn products were isolated by gel electrophoresis and gel purification using Qiagen gel extraction (Valencia, Calif. USA, Cat. No. 28706) following the manufactures instructions. Gel purified yeast genetic elements were then cloned into pYes2.1-topo vector (SEQ ID NO:183, Invitrogen Corp, Carlsbad, Calif., USA) following manufacture instructions. Colonies were screened by PCRn and then sequenced by Genewiz.

TABLE 51
Yeast Tolerance Primers

| Gene | Primer A | Primer B |
|---|---|---|
| spe3 | SEQID 0155 | SEQID 0156 |
| hom2 | SEQID 0157 | SEQID 0158 |
| MET6 | SEQID 0159 | SEQID 0160 |
| ILV2 | SEQID 0161 | SEQID 0162 |
| ILV6 | SEQID 0163 | SEQID 0164 |
| THR1 | SEQID 0165 | SEQID 0166 |
| SER2 | SEQID 0167 | SEQID 0168 |
| SER3 | SEQID 0169 | SEQID 0170 |
| ARG2 | SEQID 0171 | SEQID 0172 |
| RNR1 | SEQID 0173 | SEQID 0174 |
| aro3 | SEQID 0175 | SEQID 0176 |
| ARO7 | SEQID 0177 | SEQID 0178 |
| TYR1 | SEQID 0179 | SEQID 0180 |
| TRP1 | SEQID 0181 | SEQID 0182 |

### Example 59

### Sub-Cloning Yeast Genetic Elements into E. Coli/Yeast Shuttle Vectors pRS423 and pRS425

[0738] Genetic elements were excised from pYes2.1 by restriction digestion with restriction enzymes PvuII and XbaI. Restriction fragments containing yeast genetic elements were isolated by gel electrophoresis and gel purification using Qiagen gel extraction (Valencia, Calif. USA, Cat. No. 28706) following manufactures instructions. Backbone vectors pRS423 and pRS425 were digested with SmaI and SpeI restriction enzymes and gel purified. Yeast genetic elements were ligated into pRS423 and pRS425 (SEQ ID NO:184 and 185). All plasmids were checked using PCRn analysis and sequencing.

### Example 60

### Yeast Strain Construction

[0739] Yeast strains were constructed using standard yeast transformation and selected for by complementation of auxotrophic markers. All strains are S288C background. For general yeast transformation methods, see Gietz, R. D. and R. A. Woods. (2002) “Transformation of Yeast by the Liac/SS Carrier DNA/PEG Method.” Methods in Enzymology 350: 87-96.

### Example 61

### Evaluation of Supplements and/or Genetic Modifications on 3HP Tolerance in Yeast

[0740] The effect of supplementation and/or genetic modifications on 3HP tolerance was determined by MIC evaluations using the methods described in this Example. Supplements tested are listed in Tables 52 and 53 for aerobic and anaerobic conditions, respectively. Genetic modifications tested in yeast are listed in Tables 54 and 55 for aerobic and anaerobic conditions, respectively. Results of the MIC evaluations are provided in Tables 52-55. This data, which includes single and multiple supplement additions and genetic modifications, demonstrates improvement in 3-HP tolerance in these culture systems based on the MIC evaluations described herein.

### Method for Yeast Aerobic Minimum Inhibitory Concentration Evaluation

[0741] The minimum inhibitory concentration (MIC) was determined aerobically in a 96 well-plate format. Plates were setup such that each individual well, when brought to a final volume of 100 uL following inoculation, had the following component levels (corresponding to synthetic minimal glucose medium (SD) standard media without vitamins): 20 g/L dextrose, 5 g/L ammonium sulfate, 850 mg/L potassium phosphate monobasic, 150 mg/L potassium phosphate dibasic, 500 mg/L magnesium sulfate, 100 mg/L sodium chloride, 100 mg/L calcium chloride, 500 μg/L boric acid, 40 μg/L copper sulfate, 100 μg/L potassium iodide, 200 μg/L ferric chloride, 400 μg/L manganese sulfate, 200 μg/L sodium molybdate, and 400 μg/L zinc sulfate. Media supplements were added according to levels reported in the Supplements Table, where specified. Overnight cultures of strains were grown in triplicate in 5 mL SD media with vitamins (Methods in Enzymology vol. 350, page 17 (2002)). A 1% (v/v) inoculum was introduced into a 5 ml culture of SD minimal media without vitamins. After the cells reached mid-exponential phase, the culture was diluted to an OD₆₀₀ of 0.200. The cells were further diluted 1:5 and a 10 μL aliquot was used to inoculate each well of a 96 well plate (˜10⁴ cells per well) to total volume of 100 uL. The plate was arranged to measure the growth of variable strains or growth conditions in increasing 3-HP concentrations, 0 to 60 g/L, in 5 g/L increments. Plates were incubated for 72 hours at 30 C. The minimum inhibitory 3-HP concentration and maximum 3-HP concentration corresponding to visible cell growth (OD˜0.1) was recorded after 72 hours. For cases when MIC>60 g/L, assessments were performed in plates with extended 3-HP concentrations (0-100 g/L, in 5 g/L increments).

### Method for Yeast Anaerobic Minimum Inhibitory Concentration Evaluation

[0742] The minimum inhibitory concentration (MIC) was determined anaerobically in a 96 well-plate format. Plates were setup such that each individual well, when brought to a final volume of 100 uL following inoculation, had the following component levels (corresponding to synthetic minimal glucose medium (SD) standard media without vitamins):20 g/L dextrose, 5 g/L ammonium sulfate, 850 mg/L potassium phosphate monobasic, 150 mg/L potassium phosphate dibasic, 500 mg/L magnesium sulfate, 100 mg/L sodium chloride, 100 mg/L calcium chloride, 500 ug/L boric acid, 40 ug/L copper sulfate, 100 ug/L potassium iodide, 200 ug/L ferric chloride, 400 ug/L manganese sulfate, 200 ug/L sodium molybdate, and 400 ug/L zinc sulfate. Overnight cultures of strains were grown in triplicate in 5 mL SD media with vitamins (Methods in Enzymology vol. 350, page 17 (2002)). A 1% (v/v) inoculum was introduced into a 5 ml culture of SD minimal media without vitamins. After the cells reached mid-exponential phase, the culture was diluted to an OD₆₀₀ of 0.200. The cells were further diluted 1:5 and a 10 μL aliquot was used to inoculate each well of a 96 well plate (˜10⁴ cells per well) to total volume of 100 uL. The plate was arranged to measure the growth of variable strains or growth conditions in increasing 3-HP concentrations, 0 to 60 g/L, in 5 g/L increments. Plates were incubated for 72 hours at 30 C. The minimum inhibitory 3-HP concentration and maximum 3-HP concentration corresponding to visible cell growth (OD˜0.1) was recorded after 72 hours. For cases when MIC>60 g/L, assessments were performed in plates with extended 3-HP concentrations (0-100 g/L, in 5 g/L increments). Plates were sealed in biobag anaerobic chambers that contained gas generators for anaerobic conditions and incubated for 72 hours at 30 C. The minimum inhibitory 3-HP concentration and maximum 3-HP concentration corresponding to visible cell growth (OD˜0.1) was recorded after 72 hours. For cases when MIC>60 g/L, assessments were performed in plates with extended 3-HP concentrations (0-100 g/L, in 5 g/L increments).

TABLE 52
Yeast Supplement Results Under Aerobic Conditions

| | | | | | | | % |
|---|---|---|---|---|---|---|---|
| | | | | Average MIC | | MIC | Increase |
| | Strain | | | Assay Result | | Assay | Over |
| | Name | Media | Supplements (Group) | (g/L 3-HP) | S.D. | Number | Control |
| CONTROLS | S288C | SD | none | 45 | 2.5 | ≧3 | — |
| | S288C | SC | none | 60 | <2.5 | ≧3 | 33 |
| | S288C | SD | Tryptophan (A) | 54 | 17.4 | ≧3 | 20 |
| | S288C | SD | Shikimate (A) | 80 | <2.5 | ≧3 | 78 |
| | S288C | SD | Chorismate Group Mix (A) | 80 | <2.5 | ≧3 | 78 |
| | S288C | SD | Glycine (B) | 50 | 11.0 | ≧3 | 11 |
| | S288C | SD | Methionine (B) | 72 | 16.9 | ≧3 | 59 |
| | S288C | SD | 2-oxobutyrate (B) | 50 | <2.5 | ≧3 | 11 |
| | S288C | SD | Aspartate | 57 | 2.9 | ≧3 | 26 |
| | S288C | SD | Homocysteine Group Mix (B) | 87 | 5.8 | ≧3 | 93 |
| | S288C | SD | Putrescine(C) | 55 | 16.4 | ≧3 | 22 |
| | S288C | SD | Citrulline (C) | 58 | 21.4 | ≧3 | 28 |

Supplement Combinations

| | | | | | | | |
|---|---|---|---|---|---|---|---|
| Control | S288C | SD | none | 45 | 2.5 | ≧3 | — |
| | S288C | SD | Tyrosine (A), Methionine (B), Putrescine | 77 | 4.7 | ≧3 | 70 |
| | | | (C), Lysine (D) | | | | |
| | S288C | SD | Methionine (B), Ornithine (C) | 80 | 0.0 | ≧3 | 78 |
| | S288C | SD | Homocysteine (B), Spermidine (C) | 77 | 4.7 | ≧3 | 70 |
| | S288C | SD | Tyrosine (A), Bicarbonate (C), Lysine | 70 | <2.5 | ≧3 | 56 |
| | | | (D) | | | | |
| | S288C | SD | Tyrosine (A), Bicarbonate (C), Uracil (E) | 67 | 4.7 | ≧3 | 48 |
| | S288C | SD | Methionine (B), Spermidine (C), Lysine | 77 | 4.7 | ≧3 | 70 |
| | | | (D) | | | | |
| | S288C | SD | Methionine (B), Bicarbonate (C), Lysine | 70 | <2.5 | ≧3 | 56 |
| | | | (D) | | | | |
| | S288C | SD | Methionine (B), Bicarbonate (C), Uracil | 77 | 4.7 | ≧3 | 70 |
| | | | (E) | | | | |
| | S288C | SD | Methionine (B), Bicarbonate (C), Citrate | 50 | <2.5 | ≧3 | 11 |
| | | | (F) | | | | |
| | S288C | SD | Putrescine (C), Lysine (D) | 57 | 4.7 | ≧3 | 26 |
| | S288C | SD | Tyrosine (A), Methionine (B), Putrescine | 77 | 4.7 | ≧3 | 70 |
| | | | (C), Lysine (D), Uracil (E), Citrate (F) | | | | |
| | S288C | SD | Tyrosine (A), Putrescine (C) | 77 | 4.7 | ≧3 | 70 |
| | S288C | SD | Tetrahydrofolate (A), Spermidine (C) | 70 | <2.5 | ≧3 | 56 |
| | S288C | SD | Homocysteine (B), Putrescine (C) | 80 | <2.5 | ≧3 | 78 |
| | S288C | SD | Spermidine (C), Lysine (D) | 70 | <2.5 | ≧3 | 56 |
| | S288C | SD | Bicarbonate (C), Citrate (F) | 50 | <2.5 | ≧3 | 11 |
| | S288C | SD | Tyrosine (A), Bicarbonate (C), Citrate (F) | 50 | <2.5 | ≧3 | 11 |
| | S288C | SD | Methionine (B), Spermidine (C), Citrate | 67 | 4.7 | ≧3 | 48 |
| | | | (F) | | | | |
| | S288C | SD | Homocysteine (B), Bicarbonate (C), | 60 | <2.5 | ≧3 | 33 |
| | | | Uracil (E) | | | | |

TABLE 53
Yeast Supplement Results Under Anaerobic Conditions

| | | | | | | | % |
|---|---|---|---|---|---|---|---|
| | | | | Average MIC | | MIC | Increase |
| | Strain | | | Assay Result | | Assay | Over |
| | Name | Media | Supplements (Group) | (g/L 3-HP) | S.D. | Number | Control |
| CONTROLS | S288C | SD | none | 38 | 2.7 | ≧3 | — |
| | S288C | SD | Phenylalanine (A) | 38 | 2.9 | ≧3 | 2 |
| | S288C | SD | Tryptophan (A) | 55 | 5.5 | ≧3 | 47 |
| | S288C | SD | Shikimate (A) | 60 | <2.5 | ≧3 | 60 |
| | S288C | SD | Chorismate Group Mix (A) | 48 | 4.1 | ≧3 | 29 |
| | S288C | SD | Homocysteine (B) | 40 | <2.5 | ≧3 | 7 |
| | S288C | SD | Isoleucine (B) | 38 | 2.9 | ≧3 | 2 |
| | S288C | SD | Serine (B) | 45 | <2.5 | ≧3 | 20 |
| | S288C | SD | Glycine (B) | 60 | <2.5 | ≧3 | 60 |
| | S288C | SD | Methionine (B) | 100 | <2.5 | ≧3 | 167 |
| | S288C | SD | Threonine (B) | 38 | 2.9 | ≧3 | 2 |
| | S288C | SD | 2-oxobutyrate (B) | 38 | 2.9 | ≧3 | 2 |
| | S288C | SD | Homocysteine Group Mix (B) | 100 | <2.5 | ≧3 | 167 |
| | S288C | SD | Putrescine(C) | 58 | 4.1 | ≧3 | 56 |
| | S288C | SD | Cadaverine (C) | 60 | 4.1 | ≧3 | 60 |
| | S288C | SD | Spermidine (C) | 60 | <2.5 | ≧3 | 60 |
| | S288C | SD | Citrulline (C) | 97 | 5.8 | ≧3 | 158 |
| | S288C | SD | Bicarbonate (C) | 90 | <2.5 | ≧3 | 140 |
| | S288C | SD | Polyamine Group Mix (C) | 42 | 2.9 | ≧3 | 11 |
| | S288C | SD | Lysine (D) | 45 | <2.5 | ≧3 | 20 |

Supplement Combinations

| | | | | | | | |
|---|---|---|---|---|---|---|---|
| Control | S288C | SD | none | 38 | 2.7 | ≧3 | 0 |
| | S288C | SD | Isoleucine (B), Bicarbonate (C), | 67 | <2.5 | ≧3 | 78 |
| | | | Lysine (D) | | | | |
| | S288C | SD | Homocysteine (B), Bicarbonate | 80 | <2.5 | ≧3 | 113 |
| | | | (C), Lysine (D) | | | | |
| | S288C | SD | Tyrosine (A), Methionine (B), | 55 | 4.7 | ≧3 | 47 |
| | | | Putrescine (C), Lysine (D) | | | | |
| | S288C | SD | Methionine (B), Putrescine (C) | 55 | <2.5 | ≧3 | 47 |
| | S288C | SD | Methionine (B), Ornithine (C) | 50 | <2.5 | ≧3 | 33 |
| | S288C | SD | Homocysteine (B), Spermidine | 40 | 4.7 | ≧3 | 7 |
| | | | (C) | | | | |
| | S288C | SD | Tyrosine (A), Bicarbonate (C), | 70 | <2.5 | ≧3 | 87 |
| | | | Lysine (D) | | | | |
| | S288C | SD | Tyrosine (A), Bicarbonate (C), | 50 | 4.7 | ≧3 | 33 |
| | | | Uracil (E) | | | | |
| | S288C | SD | Methionine (B), Spermidine (C), | 100 | 4.7 | ≧3 | 167 |
| | | | Lysine (D) | | | | |
| | S288C | SD | Methionine (B), Bicarbonate | 80 | <2.5 | ≧3 | 113 |
| | | | (C), Lysine (D) | | | | |
| | S288C | SD | Methionine (B), Bicarbonate | 78 | 4.7 | ≧3 | 107 |
| | | | (C), Uracil (E) | | | | |
| | S288C | SD | Methionine (B), Bicarbonate | 73 | <2.5 | ≧3 | 93 |
| | | | (C), Citrate (F) | | | | |
| | S288C | SD | Homocysteine (B), Bicarbonate | 77 | <2.5 | ≧3 | 104 |
| | | | (C) | | | | |
| | S288C | SD | Putrescine (C), Lysine (D) | 77 | <2.5 | ≧3 | 104 |
| | S288C | SD | Tyrosine (A), Methionine (B), | 68 | 4.7 | ≧3 | 82 |
| | | | Putrescine (C), Lysine (D), | | | | |
| | | | Uracil (E), Citrate (F) | | | | |
| | S288C | SD | Tyrosine (A), Putrescine (C) | 57 | 4.7 | ≧3 | 51 |
| | S288C | SD | Tyrosine (A), Spermidine (C) | 60 | 4.7 | ≧3 | 60 |
| | S288C | SD | Tetrahydrofolate (A), | 50 | <2.5 | ≧3 | 33 |
| | | | Spermidine (C) | | | | |
| | S288C | SD | Methionine (B), Spermidine (C) | 50 | <2.5 | ≧3 | 33 |
| | S288C | SD | Homocysteine (B), Putrescine | 100 | <2.5 | ≧3 | 167 |
| | | | (C) | | | | |
| | S288C | SD | Spermidine (C), Lysine (D) | 100 | <2.5 | ≧3 | 167 |
| | S288C | SD | Bicarbonate (C), Citrate (F) | 50 | <2.5 | ≧3 | 33 |
| | S288C | SD | Tyrosine (A), Methionine (B), | 40 | <2.5 | ≧3 | 7 |
| | | | Uracil (E) | | | | |
| | S288C | SD | Tyrosine (A), Bicarbonate (C), | 50 | <2.5 | ≧3 | 33 |
| | | | Citrate (F) | | | | |
| | S288C | SD | Methionine (B), Spermidine (C), | 50 | <2.5 | ≧3 | 33 |
| | | | Citrate (F) | | | | |
| | S288C | SD | Homocysteine (B), Bicarbonate | 57 | 4.7 | ≧3 | 51 |
| | | | (C), Uracil (E) | | | | |

TABLE 54
Yeast Genetic Modification Results Under Aerobic Conditions

| | | | | Vector based | MIC Assay | | MIC | % Increase |
|---|---|---|---|---|---|---|---|---|
| | | Group | | Genetic | Result (g/L | | Assay | Over |
| Strain Name | Media | Represented | Parent | Modifications | 3-HP) | S.D. | Number | Control |
| YX-CJR-001 | SD | none | BY4709 | pRS426 EV | 40 | <2.5 | ≧3 | — |
| YX-CJR-002 | SD | C | BY4709 | pYes2.1-spe3 | 50 | <2.5 | ≧3 | 25 |
| YX-CJR-003 | SD | B | BY4709 | pYes2.1-hom2 | 47 | <2.5 | ≧3 | 17 |
| YX-CJR-005 | SD | B | BY4709 | pYes2.1-Met6 | 50 | <2.5 | ≧3 | 25 |
| YX-CJR-006 | SD | B | BY4709 | pYes2.1-Ilv2 | 57 | <2.5 | ≧3 | 42 |
| YX-CJR-010 | SD | B | BY4709 | pyes2.1-Thr1 | 60 | <2.5 | ≧3 | 50 |
| YX-CJR-014 | SD | C | BY4709 | pyes2.1-arg2 | 60 | <2.5 | ≧3 | 50 |
| YX-CJR-017 | SD | A | BY4709 | pyes2.1-Aro7 | 70 | <2.5 | ≧3 | 75 |
| YX-022 | SD | A, B | BY4722 | pyes2.1-Aro3 | 60 | <2.5 | ≧3 | 50 |
| | | | | pRS425-ILV6 | | | | |

TABLE 55
Yeast Genetic Modification Results Under Anaerobic Conditions

| | | | | | MIC Assay | | MIC | % Increase |
|---|---|---|---|---|---|---|---|---|
| | | Group | | Vector based Genetic | Result | | Assay | Over |
| Strain Name | Media | Represented | Parent | Modifications | (g/L 3-HP) | P-value | Number | Control |
| YX-CJR-001 | SD | none | BY4709 | pRS426 EV | 40 | <0.1 | ≧3 | — |
| YX-CJR-005 | SD | B | BY4709 | pYes2.1-Met6 | 60 | <0.1 | ≧3 | 50 |
| YX-CJR-007 | SD | B | BY4709 | pyes2.1-ILV6 | 50 | <0.1 | ≧3 | 25 |
| YX-CJR-008 | SD | B | BY4709 | pyes2.1-ILV1 | 60 | <0.1 | ≧3 | 50 |
| YX-CJR-010 | SD | B | BY4709 | pyes2.1-Thr1 | 50 | <0.1 | ≧3 | 25 |
| YX-CJR-011 | SD | B | BY4709 | pyes2.1-Ser2 | 50 | <0.1 | ≧3 | 25 |
| YX-CJR-013 | SD | B | BY4709 | pyes2.1-ser3 | 50 | <0.1 | ≧3 | 25 |
| YX-CJR-014 | SD | C | BY4709 | pyes2.1-arg2 | 50 | <0.1 | ≧3 | 25 |
| YX-CJR-015 | SD | E | BY4709 | pyes2.1-RNR1 | 50 | <0.1 | ≧3 | 25 |
| YX-CJR-016 | SD | A | BY4709 | pyes2.1-Aro3 | 50 | <0.1 | ≧3 | 25 |
| YX-CJR-018 | SD | A | BY4709 | pyes2.1-Tyr1 | 50 | <0.1 | ≧3 | 25 |
| YX-CJR-021 | SD | A | BY4709 | pYes2.1-Trp1 | 50 | <0.1 | ≧3 | 25 |
| YX-022 | SD | A, B | BY4722 | pyes2.1-Aro3 pRS425- | 50 | <0.1 | ≧3 | 25 |
| | | | | ILV6 | | | | |

TABLE 56
C. necator Supplement Results under Aerobic Conditions

| | | | | average MIC | | MIC | |
|---|---|---|---|---|---|---|---|
| Strain | | | Supplement | Assay Result | | Assay | % Increase |
| Name | Media | Supplements | Codes | (g/L 3-HP) | P-value | Number | Over Control |
| DSM428 | FGN | none | none | 15 | <0.1 | ≧3 | — |
| DSM 542 | EZ Rich | none | none | 60 | <0.1 | ≧3 | 200 |
| DSM 542 | FGN | none | none | 15 | <0.1 | ≧3 | 0 |
| DSM 542 | FGN | Homocysteine Bicarbonate, Lysine | B, C, D | 30 | <0.1 | ≧3 | 100 |
| DSM 542 | FGN | Tyrosine, Methionine, Putrescine, | A, B, C, D | 30 | <0.1 | ≧3 | 100 |
| | | Lysine | | | | | |
| DSM 542 | FGN | Methionine, Putrescine | B, C | 25 | <0.1 | ≧3 | 67 |
| DSM 542 | FGN | Methionine, Ornithine | B, C | 30 | <0.1 | ≧3 | 100 |
| DSM 542 | FGN | Homocysteine, Spermidine | B, C | 25 | <0.1 | ≧3 | 67 |
| DSM 542 | FGN | Methionine, Bicarbonate, Citrate | B, C, F | 25 | <0.1 | ≧3 | 67 |
| DSM 542 | FGN | Homocysteine, Bicarbonate | B, C | 25 | <0.1 | ≧3 | 67 |
| DSM 542 | FGN | Homocysteine Group Mix | B | 20 | <0.1 | ≧3 | 33 |

### Example 62

### Evaluation of 3HPTGC-Related Supplements in Cupriavidus necator

[0743] The effect of supplementation on 3HP tolerance in C. necator was determined by MIC evaluations using the methods described in the Common Methods Section. Supplements tested are listed in the Supplements Table.

[0744] MIC results under aerobic condition for C. necator are provided in Table 56. This data, which includes single and multiple supplement additions, demonstrates improvement in 3-HP tolerance in these culture systems based on the MIC evaluations.

### Example 63

### Additional Example of 3HPTGC Tolerance-Directed Genetic Modification(s) in Combination with 3-HP Production Genetic Modification(s)

[0745] In addition to Example 42, which provides a general example to combine tolerance and 3-HP production genetic modifications to obtain a desired genetically modified microorganism suitable for use to produce 3-HP, and in view of the examples following Example 43, and considering additional disclosure herein, and methods known to those skilled in the art (e.g., Sambrook and Russell, 2001, incorporated into this example for its methods of genetic modifications), this example provides a microorganism species genetically modified to comprise one or more genetic modifications of the 3HPTGC to provide an increase tolerance to 3-HP (which may be assessed by any metric such as those discussed herein) and one or more genetic modifications to increase 3-HP production (such as of a 3-HP production pathway such as those disclosed herein).

[0746] The so-genetically modified microorganism may be evaluated both for tolerance to and production of 3-HP under varying conditions including oxygen content of the culture system and nutrient composition of the media.

[0747] In various aspects of this example, multiple sets of genetic modifications are made and are compared to identify one or more genetically modified microorganisms that comprise desired attributes and/or metrics for increased 3-HP tolerance and production.

### Example 64

### Introduction of Genetic Modification Encoding the Irok Sequence Combined with 3HPTGC Genetic Modifications

[0748] Example 45 describes Irok, a peptide comprised of 21 amino acids, and its 3-HP tolerance improving effect when a plasmid encoding it is introduced into an E. coli strain and evaluated under microaerobic conditions. Considering the disclosure herein regarding the 3HPTGC, and methods known to those skilled in the art (e.g., Sambrook and Russell, 2001, incorporated into this example for its methods of genetic modifications), a microorganism species is genetically modified to comprise a nucleic acid sequence that encodes the IroK peptide sequence and one or more genetic modifications of the 3HPTGC, collectively to provide an increase tolerance to 3-HP. Such increase in 3-HP tolerance may be assessed by any metric such as those discussed herein.

[0749] Thus, based on the results various genetic modification combinations that include representation from two or more of the Groups A-E may be evaluated, and employed, in a microorganism to achieve a desired elevated tolerance to 3-HP. The tables above show the results of particular genetic modification combinations that include combinations from these groups. Also, additional genetic modifications may be provided from Group F. As described elsewhere herein, any such combination may be combined with other genetic modifications that may include one or more of: 3-HP bio-production pathways to provide and/or increase 3-HP synthesis and accumulation by the recombinant microorganism, and deletions or other modifications to direct more metabolic resources (e.g., carbon and energy) into 3-HP bio-production, as well as other genetic modifications directed to modulate flux into the fatty acid synthase system.

### Example 65

### Production of Flaviolin Polyketide

[0750] This example provides data and analysis from strains to which plasmids were added in various combinations. One such plasmid comprises a gene for 1,3,6,8-tetrahydronapthalene synthase (rppA from Streptomyces coelicolor A3(2)), which was codon-optimized for E. coli (DNA2.0, Menlo Park, Calif. USA). Below this is referred to as THNS, which converts 5 malonyl-CoA to one molecule of 1,3,6,8-naphthalenetetrol, 5 CO₂, and 5 coenzyme A. The 1,3,6,8-naphthalenetetrol product of THNS is reported to convert spontaneously to the polyketide flaviolin (CAS No. 479-05-0), which is readily detected spectrometrically at 340 nm. Another plasmid comprises acetyl-CoA carboxylase genes ABCD, which as described elsewhere herein may increase supply of malonyl-CoA from acetyl-CoA.

[0751] Two of the strains comprise mutant forms of one or more genes of the fatty acid synthase pathway. These forms are temperature-sensitive and have lower activity at 37 C. These strains are designated as BX595, comprising a temperature-sensitive mutant fabI, and BX660, comprising both temperature-sensitive fabI and fabB genes.

[0752] The results herein generally demonstrate that polyketide synthesis is increased when a genetically modified microorganism comprises both at least one heterologous nucleic acid sequence of a polyketide synthesis pathway and at least one modification to decrease activity, such as transiently, of one or more enzymatic conversion steps of the fatty acid synthase pathway. This is considered to reduce enzymatic activity in the microorganism's fatty acid synthase pathway providing for reduced conversion of malonyl-CoA to fatty acids, and in this case lead to increased polyketide synthesis.

[0753] The following strains and plasmids were obtained or made using common genetic/molecular biology methods, such as described elsewhere herein, and also in Sambrook and Russell, “Molecular Cloning: A Laboratory Manual,” Third Edition 2001 (volumes 1-3), Cold Spring Harbor Laboratory Press, Cold Spring Harbor, N.Y. Respective genotypes follow strain identifications.

[0754] BW25113 (F-, Δ(araD-araB)567, ΔlacZ4787(::rrnB-3), LAM-, rph-1, Δ(rhaD-rhaB)568, hsdR514)

[0755] BX595 (F-, Δ(araD-araB)567, ΔlacZ4787(::rrnB-3), LAM-, rph-1, Δ(rhaD-rhaB)568, hsdR514, ΔldhA:frt, ΔpflB:frt, mgsA:frt, ΔpoxB:frt, Δpta-ack:frt, fabIts (S241F)-zeoR)

[0756] BX660 (F-, Δ(araD-araB)567, ΔlacZ4787(::rrnB-3), LAM-, rph-1, Δ(rhaD-rhaB)568, hsdR514, ΔldhA:frt, ΔpflB:frt, mgsA:frt, ΔpoxB:frt, Δpta-ack:frt, fabIts (S241F)-zeoR, fabBts-BSD)

[0757] pTRC-ptrc_THNS (SEQ ID NO:906) (developed from Invitrogen's ptrc-HisA plasmid, Invitrogen, Carlsbad, Calif. USA, with THNS under control of ptrc promoter in this plasmid

[0758] pJ251-accABCD

[0759] Preparation of SM3 Media is described in the Common Methods Section, as are various standard methods applicable to this Example.

[0760] The following scientific articles provide background teachings related to production of polyketides, and particularly of flaviolin by Streptomyces coelicolr A3(2), and are incorporated by reference for such teachings: J Biol. Chem. 2005 Apr. 15; 280(15):14514-23. Epub 2005 Feb. 8; “A novel quinone-forming monooxygenase family involved in modification of aromatic polyketides.” Funa N, Funabashi M, Yoshimura E, Horinouchi S. Department of Biotechnology, Graduate School of Agriculture and Life Sciences, the University of Tokyo, Bunkyo-ku, Tokyo 113-8657, Japan; and J Biol. Chem. 2005 Mar. 25; 280(12):11599-607. Epub 2005 Jan. 19; “Binding of two flaviolin substrate molecules, oxidative coupling, and crystal structure of Streptomyces coelicolor A3(2) cytochrome P450 158A2.” Zhao B, Guengerich F P, Bellamine A, Lamb D C, Izumikawa M, Lei L, Podust L M, Sundaramoorthy M, Kalaitzis J A, Reddy L M, Kelly S L, Moore B S, Stec D, Voehler M, Falck J R, Shimada T, Waterman M R.

### Department of Biochemistry, Vanderbilt University School of Medicine, Nashville, Tenn. 37232-0146, USA.

[0761] Using the above-listed E. coli strains and plasmids, the following were prepared by standard introduction of plasmids to E. coli strains:

[0762] 1. BW25113+pTRC-ptrc_THNS

[0763] 2. BW25113+pTRC-ptrc_THNS; pJ251+accABCD

[0764] 3. BX595+pTRC-ptrc_THNS

[0765] 4. BX595+pTRC-ptrc_THNS; pJ251+accABCD

[0766] 5. BX660+pTRC-ptrc_THNS

[0767] 6. BX660+pTRC-ptrc_THNS; pJ251+accABCD

These then were evaluated as described below by following the protocols summarized for each respective evaluation.

### A: 96 Deep Well Plate Screen:

[0768] The BW25113 and BX595 strains above were run in triplicate.
[0769] 1 mL SM3 or LB media with amp and IPTG was added to the appropriate number of wells.
[0770] The wells were inoculated with single colonies picked from plates.
[0771] The 96 well plate was put at 30 C for ˜6-8 hours then shifted to 37 C overnight.
[0772] After 24 hours, a 200 uL aliquot was removed and transferred to a 96 well flat bottom plate used for measuring absorbance on the spectrometer.
[0773] The first read was done at OD600 to quantify cell growth and to use for normalizing the flaviolin reading.
[0774] The plate was then spun at 4000 rpm for 10 minutes.
[0775] A 150 uL aliquot was removed and read at OD340 to quantify the amount of flaviolin produced.
[0776] The data is reported as both OD340/OD600 and just OD340.

### B: Shake Flask Screen #1:

[0777] 25 mL cultures of BW25113 and BX595 strains were grown overnight in TB medium with appropriate antibiotics.
[0778] 50 mL shake flask cultures were set up in SM3 with a 5% inoculation from the TB overnight cultures.
[0779] The shake flasks were induced at time of inoculation.
[0780] The cultures were grown for 48 hours and samples were taken for flaviolin readings throughout the experiment.
[0781] Again, data is reported as both OD340/OD600 and just OD340.

### C: Shake Flask Screen #2:

[0782] The shake flask experiment above was repeated for 24 hours only and with all three background strains mentioned above.
[0783] Samples were taken at the 24 hour time point only.
   Data is shown below. ANOVA tests were run when necessary to compare data and find statistically significant results. The amounts of malonyl-CoA produced by the different strains should be evident by flaviolin levels.

### Raw Data:

[0784] 96 Deep Well Plate Screen:
Shake Flask Screen #1:

### Complied Data:

[0785] Data was compiled around the 24 hour time point for both shake flasks and 96 deep well plates from these two experiments to see if there is a difference in flaviolin production in either growth condition.

Shake Flask Screen #2 Data Summary Including Showing Flaviolin Per Unit OD600, Reflecting Per g DCW:

[0786] The following are non-limiting general prophetic examples directed to practicing the present invention in other microorganism species.

### General Prophetic Example 66

### Improvement of 3-HP Tolerance, 3-HP Bio-Production, and/or Production of Other Selected Chemical Products in Rhodococcus erythropolis

[0787] A series of E. coli-Rhodococcus shuttle vectors are available for expression in R. erythropolis, including, but not limited to, pRhBR17 and pDA71 (Kostichka et al., Appl. Microbiol. Biotechnol. 62:61-68 (2003)). Additionally, a series of promoters are available for heterologous gene expression in R. erythropolis (see for example Nakashima et al., Appl. Environ. Microbiol. 70:5557-5568 (2004), and Tao et al., Appl. Microbiol. Biotechnol. 2005, DOI 10.1007/s00253-005-0064). Targeted gene disruption of chromosomal genes in R. erythropolis may be created using the method described by Tao et al., supra, and Brans et al. (Appl. Environ. Microbiol. 66: 2029-2036 (2000)). These published resources are incorporated by reference for their respective indicated teachings and compositions.

[0788] The nucleic acid sequences required for providing an increase in 3-HP tolerance, as described herein, optionally with nucleic acid sequences to provide and/or improve a 3-HP biosynthesis pathway, are cloned initially in pDA71 or pRhBR71 and transformed into E. coli. The vectors are then transformed into R. erythropolis by electroporation, as described by Kostichka et al., supra. The recombinants are grown in synthetic medium containing glucose and the 3-HP Tolerance, 3-HP Bio-production, and/or production of other selected chemical products are followed using methods known in the art or described herein.

### General Prophetic Example 67

### Improvement of 3-HP Tolerance, 3-HP Bio-Production, and/or Production of Other Selected Chemical Products in B. licheniformis

[0789] Most of the plasmids and shuttle vectors that replicate in B. subtilis are used to transform B. licheniformis by either protoplast transformation or electroporation. The nucleic acid sequences required for improvement of 3-HP tolerance, and/or for 3-HP biosynthesis are isolated from various sources, codon optimized as appropriate, and cloned in plasmids pBE20 or pBE60 derivatives (Nagarajan et al., Gene 114:121-126 (1992)). Methods to transform B. licheniformis are known in the art (for example see Fleming et al. Appl. Environ. Microbiol., 61(11):3775-3780 (1995)). These published resources are incorporated by reference for their respective indicated teachings and compositions.

[0790] The plasmids constructed for expression in B. subtilis are transformed into B. licheniformis to produce a recombinant microorganism that then demonstrates improved 3-HP Tolerance, 3-HP Bio-production, and/or production of other selected chemical products.

### General Prophetic Example 68

### Improvement of 3-HP Tolerance, 3-HP Bio-Production, and/or Production of Other Selected Chemical Products in Paenibacillus macerans

[0791] Plasmids are constructed as described herein for expression in B. subtilis and used to transform Paenibacillus macerans by protoplast transformation to produce a recombinant microorganism that demonstrates improved 3-HP Tolerance, 3-HP Bio-production, and/or production of other selected chemical products.

### General Prophetic Example 69

### Expression of 3-HP Tolerance, 3-HP Bio-Production, and/or Production of Other Selected Chemical Products in Alcaligenes (Ralstonia) Eutrophus (Currently Referred to as Cupriavidus necator)

[0792] Methods for gene expression and creation of mutations in Alcaligenes eutrophus are known in the art (see for example Taghavi et al., Appl. Environ. Microbiol., 60(10):3585-3591 (1994)). This published resource is incorporated by reference for its indicated teachings and compositions. Any of the nucleic acid sequences identified to improve 3-HP tolerance, and/or for 3-HP biosynthesis are isolated from various sources, codon optimized as appropriate, and cloned in any of the broad host range vectors described herein, and electroporated to generate recombinant microorganisms that demonstrate improved 3-HP Tolerance, 3-HP Bio-production, and/or production of other selected chemical products. The poly(hydroxybutyrate) pathway in Alcaligenes has been described in detail, a variety of genetic techniques to modify the Alcaligenes eutrophus genome is known, and those tools can be applied for engineering a 3-HP toleragenic or, optionally, a 3-HP-gena-toleragenic recombinant microorganism.

### General Prophetic Example 70

### Improvement of 3-HP Tolerance, 3-HP Bio-Production, and/or Production of Other Selected Chemical Products in Pseudomonas putida

[0793] Methods for gene expression in Pseudomonas putida are known in the art (see for example Ben-Bassat et al., U.S. Pat. No. 6,586,229, which is incorporated herein by reference for these teachings). Any of the nucleic acid sequences identified to improve 3-HP tolerance, and/or for 3-HP biosynthesis are isolated from various sources, codon optimized as appropriate, and cloned in any of the broad host range vectors described herein, and electroporated to generate recombinant microorganisms that demonstrate improved 3-HP tolerance, and, optionally, 3-HP biosynthetic production. For example, these nucleic acid sequences are inserted into pUCP18 and this ligated DNA are electroporated into electrocompetent Pseudomonas putida KT2440 cells to generate recombinant P. putida microorganisms that exhibit increased 3-HP Tolerance, 3-HP Bio-production, and/or production of other selected chemical products, comprised at least in part of introduced nucleic acid sequences.

### General Prophetic Example 71

### Improvement of 3-HP Tolerance, 3-HP Bio-Production, and/or Production of Other Selected Chemical Products in Lactobacillus plantarum

[0794] The Lactobacillus genus belongs to the Lactobacillales family and many plasmids and vectors used in the transformation of Bacillus subtilis and Streptococcus are used for Lactobacillus. Non-limiting examples of suitable vectors include pAM.beta.1 and derivatives thereof (Renault et al., Gene 183:175-182 (1996); and O'Sullivan et al., Gene 137:227-231 (1993)); pMBB1 and pHW800, a derivative of pMBB1 (Wyckoff et al. Appl. Environ. Microbiol. 62:1481-1486 (1996)); pMG1, a conjugative plasmid (Tanimoto et al., J. Bacteriol. 184:5800-5804 (2002)); pNZ9520 (Kleerebezem et al., Appl. Environ. Microbiol. 63:4581-4584 (1997)); pAM401 (Fujimoto et al., Appl. Environ. Microbiol. 67:1262-1267 (2001)); and pAT392 (Arthur et al., Antimicrob. Agents Chemother. 38:1899-1903 (1994)). Several plasmids from Lactobacillus plantarum have also been reported (e.g., van Kranenburg R, Golic N, Bongers R, Leer R J, de Vos W M, Siezen R J, Kleerebezem M. Appl. Environ. Microbiol. 2005 March; 71(3): 1223-1230).

### General Prophetic Example 72

### Improvement of 3-HP Tolerance, 3-HP Bio-Production, and/or Production of Other Selected Chemical Products in Enterococcus faecium, Enterococcus gallinarium, and Enterococcus faecalis

[0795] The Enterococcus genus belongs to the Lactobacillales family and many plasmids and vectors used in the transformation of Lactobacillus, Bacillus subtilis, and Streptococcus are used for Enterococcus. Non-limiting examples of suitable vectors include pAM.beta.1 and derivatives thereof (Renault et al., Gene 183:175-182 (1996); and O'Sullivan et al., Gene 137:227-231 (1993)); pMBB1 and pHW800, a derivative of pMBB1 (Wyckoff et al. Appl. Environ. Microbiol. 62:1481-1486 (1996)); pMG1, a conjugative plasmid (Tanimoto et al., J. Bacteriol. 184:5800-5804 (2002)); pNZ9520 (Kleerebezem et al., Appl. Environ. Microbiol. 63:4581-4584 (1997)); pAM401 (Fujimoto et al., Appl. Environ. Microbiol. 67:1262-1267 (2001)); and pAT392 (Arthur et al., Antimicrob. Agents Chemother. 38:1899-1903 (1994)). Expression vectors for E. faecalis using the nisA gene from Lactococcus may also be used (Eichenbaum et al., Appl. Environ. Microbiol. 64:2763-2769 (1998). Additionally, vectors for gene replacement in the E. faecium chromosome are used (Nallaapareddy et al., Appl. Environ. Microbiol. 72:334-345 (2006)).

[0796] For each of the General Prophetic Examples 66-72, as to 3-HP the following 3-HP bio-production comparison may be incorporated thereto: Using analytical methods for 3-HP such as are described in Subsection III of Common Methods Section, 3-HP is obtained in a measurable quantity at the conclusion of a respective bio-production event conducted with the respective recombinant microorganism (see types of bio-production events, incorporated by reference into each respective General Prophetic Example). That measurable quantity is substantially greater than a quantity of 3-HP produced in a control bio-production event using a suitable respective control microorganism lacking the functional 3-HP pathway so provided in the respective General Prophetic Example. Tolerance improvements also may be assessed by any recognized comparative measurement technique, such as by using a MIC protocol provided in the Common Methods Section. Appropriate methods for detection of other selected chemical products, such as a polyketide, may be used.

[0797] Common Methods Section

[0798] All methods in this Section are provided for incorporation into the Examples where so referenced.

[0799] Subsection I. Microorganism Species and Strains, Cultures, and Growth Media

[0800] Bacterial species, that may be utilized as needed, are as follows:

[0801] Acinetobacter calcoaceticus (DSMZ #1139) is obtained from the German Collection of Microorganisms and Cell Cultures (Braunschweig, Germany) as a vacuum dried culture. Cultures are then resuspended in Brain Heart Infusion (BHI) Broth (RPI Corp, Mt. Prospect, Ill., USA). Serial dilutions of the resuspended A. calcoaceticus culture are made into BHI and are allowed to grow for aerobically for 48 hours at 37° C. at 250 rpm until saturated.

[0802] Bacillus subtilis is a gift from the Gill lab (University of Colorado at Boulder) and is obtained as an actively growing culture. Serial dilutions of the actively growing B. subtilis culture are made into Luria Broth (RPI Corp, Mt. Prospect, Ill., USA) and are allowed to grow for aerobically for 24 hours at 37° C. at 250 rpm until saturated.

[0803] Chlorobium limicola (DSMZ#245) is obtained from the German Collection of Microorganisms and Cell Cultures (Braunschweig, Germany) as a vacuum dried culture. Cultures are then resuspended using Pfennig's Medium I and II (#28 and 29) as described per DSMZ instructions. C. limicola is grown at 25° C. under constant vortexing.

[0804] Citrobacter braakii (DSMZ #30040) is obtained from the German Collection of Microorganisms and Cell Cultures (Braunschweig, Germany) as a vacuum dried culture. Cultures are then resuspended in Brain Heart Infusion(BHI) Broth (RPI Corp, Mt. Prospect, Ill., USA). Serial dilutions of the resuspended C. braakii culture are made into BHI and are allowed to grow for aerobically for 48 hours at 30° C. at 250 rpm until saturated.

[0805] Clostridium acetobutylicum (DSMZ #792) is obtained from the German Collection of Microorganisms and Cell Cultures (Braunschweig, Germany) as a vacuum dried culture. Cultures are then resuspended in Clostridium acetobutylicum medium (#411) as described per DSMZ instructions. C. acetobutylicum is grown anaerobically at 37° C. at 250 rpm until saturated.

[0806] Clostridium aminobutyricum (DSMZ #2634) is obtained from the German Collection of Microorganisms and Cell Cultures (Braunschweig, Germany) as a vacuum dried culture. Cultures are then resuspended in Clostridium aminobutyricum medium (#286) as described per DSMZ instructions. C. aminobutyricum is grown anaerobically at 37° C. at 250 rpm until saturated.

[0807] Clostridium kluyveri (DSMZ #555) is obtained from the German Collection of Microorganisms and Cell Cultures (Braunschweig, Germany) as an actively growing culture. Serial dilutions of C. kluyveri culture are made into Clostridium kluyveri medium (#286) as described per DSMZ instructions. C. kluyveri is grown anaerobically at 37° C. at 250 rpm until saturated.

[0808] Cupriavidus metallidurans (DMSZ #2839) is obtained from the German Collection of Microorganisms and Cell Cultures (Braunschweig, Germany) as a vacuum dried culture. Cultures are then resuspended in Brain Heart Infusion (BHI) Broth (RPI Corp, Mt. Prospect, Ill., USA). Serial dilutions of the resuspended C. metallidurans culture are made into BHI and are allowed to grow for aerobically for 48 hours at 30° C. at 250 rpm until saturated.

[0809] Cupriavidus necator (DSMZ #428) is obtained from the German Collection of Microorganisms and Cell Cultures (Braunschweig, Germany) as a vacuum dried culture. Cultures are then resuspended in Brain Heart Infusion (BHI) Broth (RPI Corp, Mt. Prospect, Ill., USA). Serial dilutions of the resuspended C. necator culture are made into BHI and are allowed to grow for aerobically for 48 hours at 30° C. at 250 rpm until saturated. As noted elsewhere, previous names for this species are Alcaligenes eutrophus and Ralstonia eutrophus.

[0810] Desulfovibrio fructosovorans (DSMZ #3604) is obtained from the German Collection of Microorganisms and Cell Cultures (Braunschweig, Germany) as a vacuum dried culture. Cultures are then resuspended in Desulfovibrio fructosovorans medium (#63) as described per DSMZ instructions. D. fructosovorans is grown anaerobically at 37° C. at 250 rpm until saturated.

[0811] Escherichia coli Crooks (DSMZ#1576) is obtained from the German Collection of Microorganisms and Cell Cultures (Braunschweig, Germany) as a vacuum dried culture. Cultures are then resuspended in Brain Heart Infusion (BHI) Broth (RPI Corp, Mt. Prospect, Ill., USA). Serial dilutions of the resuspended E. coli Crooks culture are made into BHI and are allowed to grow for aerobically for 48 hours at 37° C. at 250 rpm until saturated.

[0812] Escherichia coli K12 is a gift from the Gill lab (University of Colorado at Boulder) and is obtained as an actively growing culture. Serial dilutions of the actively growing E. coli K12 culture are made into Luria Broth (RPI Corp, Mt. Prospect, Ill., USA) and are allowed to grow for aerobically for 24 hours at 37° C. at 250 rpm until saturated.

[0813] Halobacterium salinarum (DSMZ#1576) is obtained from the German Collection of Microorganisms and Cell Cultures (Braunschweig, Germany) as a vacuum dried culture. Cultures are then resuspended in Halobacterium medium (#97) as described per DSMZ instructions. H. salinarum is grown aerobically at 37° C. at 250 rpm until saturated.

[0814] Lactobacillus delbrueckii (#4335) is obtained from WYEAST USA (Odell, Oreg., USA) as an actively growing culture. Serial dilutions of the actively growing L. delbrueckii culture are made into Brain Heart Infusion (BHI) broth (RPI Corp, Mt. Prospect, Ill., USA) and are allowed to grow for aerobically for 24 hours at 30° C. at 250 rpm until saturated.

[0815] Metallosphaera sedula (DSMZ #5348) is obtained from the German Collection of Microorganisms and Cell Cultures (Braunschweig, Germany) as an actively growing culture. Serial dilutions of M. sedula culture are made into Metallosphaera medium (#485) as described per DSMZ instructions. M. sedula is grown aerobically at 65° C. at 250 rpm until saturated.

[0816] Propionibacterium freudenreichii subsp. shermanii (DSMZ#4902) is obtained from the German Collection of Microorganisms and Cell Cultures (Braunschweig, Germany) as a vacuum dried culture. Cultures are then resuspended in PYG-medium (#104) as described per DSMZ instructions. P. freudenreichii subsp. shermanii is grown anaerobically at 30° C. at 250 rpm until saturated.

[0817] Pseudomonas putida is a gift from the Gill lab (University of Colorado at Boulder) and is obtained as an actively growing culture. Serial dilutions of the actively growing P. putida culture are made into Luria Broth (RPI Corp, Mt. Prospect, Ill., USA) and are allowed to grow for aerobically for 24 hours at 37° C. at 250 rpm until saturated.

[0818] Streptococcus mutans (DSMZ#6178) is obtained from the German Collection of Microorganisms and Cell Cultures (Braunschweig, Germany) as a vacuum dried culture. Cultures are then resuspended in Luria Broth (RPI Corp, Mt. Prospect, Ill., USA). S. mutans is grown aerobically at 37° C. at 250 rpm until saturated.

[0819] The following non-limiting strains may also be used as starting strains in the Examples: DF40 Hfr(PO2A), garB10, fhuA22, ompF627(T2R), fadL701(T2R), relA1, pitA10, spoT1, rrnB-2, pgi-2, mcrB1, creC510, BW25113 F-, Δ(araD-araB)567, ΔlacZ4787(::rrnB-3), &lambda⁻, rph-1, Δ(rhaD-rhaB)568, hsdR514, JP111 Hfr(PO1), galE45(GalS), &lambda⁻, fabI392(ts), relA1, spoT1, thi-1. These strains possess recognized genetic modifications, and are available from public culture sources such as the Yale Coli Genetic Stock Collection (New Haven, Conn. USA). Strains developed from these strains are described in the Examples.

[0820] Bacterial growth culture media and associated materials and conditions, are as follows:

[0821] Fed-batch medium contained (per liter): 10 g tryptone, 5 g yeast extract, 1.5 g NaCl, 2 g Na₂HPO₄.7H₂O, 1 g KH₂PO₄, and glucose as indicated

[0822] AM2 medium contained (per liter): 2.87 g K₂HPO₄, 1.50 g KH₂PO₄, 3.13 g (NH₄)₂SO₄, 0.15 g KCl, 1.5 mM MgSO₄, 0.1M K⁺ MOPS pH 7.2, 30 g glucose, and 1 ml trace Mineral Stock prepared as described in Martinez et al. Biotechnol Lett 29:397-404 (2007)

[0823] AM2 Medium used in Fermenters for Initial Batch Medium (for Example 11)

| K₂HPO₄ | 2.87 | g/L |
|---|---|---|
| KH₂PO₄ | 1.50 | g/L |
| (NH₄)₂SO₄ | 3.13 | g/L |
| KCl | 0.15 | g/L |
| Glucose | 6.0 | g/L |
| MgSO₄ | 0.18 | g/L |
| AM2 Trace Metals | 1.0 | ml/L |
| Stock Solution | | |
| Calcium Pantothenate | 0.005 | g/L |
| Ampicillin | 0.1 | g/L |
| Kanamycin | 0.02 | g/L |
| Chloramphenicol | 0.02 | g/L |

[0824] Trace Metals Stock Solution for AM2 Medium Used in Fermenters

| | | |
|---|---|---|
| Concentrated HCl | 10.0 | ml/L |
| FeCl₃•6H₂O | 2.4 | g/L |
| CoCl₂•6H₂O | 0.17 | g/L |
| CuCl₂•2H₂O | 0.15 | g/L |
| ZnCl₂ | 0.3 | g/L |
| Na₂MoO₄•2H₂O | 0.3 | g/L |
| H₃BO₃ | 0.07 | g/L |
| MnCl₂•4H₂O | 0.5 | g/L |

[0825] Concentration of glucose in glucose feed for AM2 vessels: 200 g/L glucose

[0826] Rich Medium used in Fermenters Initial Batch Medium (for Example 11)

| | | |
|---|---|---|
| Tryptone | 10 | g/L |
| Yeast Extract | 5 | g/L |
| Glucose | 4 | g/L |
| Na₂HPO₄•7H₂O | 2 | g/L |
| KH₂PO₄ | 1 | g/L |
| MgSO₄ | 2 | g/L |
| Ampicillin | 0.1 | g/L |
| Kanamycin | 0.02 | g/L |
| Chloramphenico | 10.02 | g/L |

[0827] Feed Formulation for Additional Glucose Feed for Rich Media

| | | |
|---|---|---|
| Glucose | 200 | g/L |
| (NH₄)₂SO₄ | 30 | g/L |
| KH₂PO₄ | 7.5 | g/L |
| Citric Acid | 3 | g/L |
| MgSO₄ | 2.93 | g/L |
| FeSO₄•H₂O | 0.05 | g/L |

[0828] SM3 minimal medium for E. coli (Final phosphate concentration=27.5 mM; Final N concentration=47.4 mM NH₄⁺).

[0829] Components per liter: 700 mL DI water, 100 mL 10× SM3 Salts, 2 ml 1M MgSO₄, 1 ml 1000× Trace Mineral Stock, 60 mL 500 g/L glucose, 100 mL 0.1 M MOPS (pH 7.4), 0.1 mL of 1 M CaCl₂, Q.S. with DI water to 1000 mL, and 0.2 μm filter sterilize.

[0830] Preparation of Stock Solutions:

[0831] To make 10× SM3 Salts (1 L): 800 mL DI water, 28.7 g K₂HPO₄, 15 g KH₂PO₄, 31.3 g (NH₄)₂SO₄, 1.5 g KCl, 0.5 g Citric Acid (anhydrous), and Q.S. with DI water to 1000 mL.

[0832] To make 1000× Trace Mineral Stock (1 L): save in 50-ml portions at room temp

[0833] Per liter in 0.12M HCl (dilute 10 ml conc HCl into 1 liter water):2.4 g FeCL₃.6H₂O, 0.17 g CoCl₂.6H₂O, 0.15 g CuCl₂.2H₂O, 0.3 g ZnCl₂, 0.3 g NaMoO₄.2H₂O (Molybdic acid, disodium salt, dihydrate), 0.07 g H₃BO₃, and 0.5 g MnCl₂.4H₂O.

[0834] To make 1M MOPS:209.3 g MOPS, dissolve in 700 ml water. Take 70-ml portions and adjust to desired pH with 50% KOH, adjust to 100 mL final volume, and 0.2 μm filter sterilize.

[0835] To make 1M MgSO₄:120.37 g dissolved in 1000 mL water.

[0836] To make 500 g/L (50%) glucose stock solution: 900 mL DI water, 500 g glucose, and Q.S. to 1000 mL.

[0837] Additional Growth Media Formulations are Summarized as:

| | | Concentration | | Concentration | | Concentration | |
|---|---|---|---|---|---|---|---|
| | Ingredient | in FM3 | | in FM4 | | in FM5 | |
| 1 | K₂HPO₄ | 2.63 | g/L | 13.4 | g/L | 2.63 | g/L |
| 2 | KH₂PO₄ | 1.38 | g/L | 3 | g/L | 1.38 | g/L |
| 3 | (NH₄)₂SO₄ | 13.88 | g/L | 3 | g/L | 3 | g/L |
| 4 | NaCl | — | | 0.5 | g/L | — | |
| 5 | Citric Acid•H₂O | 2.19 | g/L | 1.1 | g/L | 2.19 | g/L |
| 6 | Yeast Extract | 1.25 | g/L | 1 | g/L | 1 | g/L |
| 7 | Antifoam 204 | 0.1 | ml/L | 0.1 | ml/L | 0.1 | ml/L |
| 8 | Glucose | 30 | g/L | 30 | g/L | 30 | g/L |
| 9 | MgSO₄•7H₂O | 0.82 | g/L | 0.48 | g/L | 0.82 | g/L |
| 10 | FM10 Trace Metals | 1.5 | ml/L | 2 | ml/L | 2 | ml/L |
| | Stock Solution | | | | | | |
| 11 | Kanamycin | 35 | mg/L | 35 | mg/L | 35 | mg/L |
| 12 | Chloramphenicol | 20 | mg/L | 20 | mg/L | 20 | mg/L |

[0838] FM10: Trace Metals Stock Solution Formulation:

| Ingredient | Concentration | |
|---|---|---|
| Concentrated HCl | 10.0 | ml/L |
| CaCl₂•2H₂O | 49 | g/L |
| FeCl₃•6H₂O | 9.7 | g/L |
| CoCl₂•6H₂O | 0.4 | g/L |
| CuCl₂•2H₂O | 2.7 | g/L |
| ZnCl₂ | 0.2 | g/L |
| Na₂MoO₄•2H₂O | 0.24 | g/L |
| H₃BO₃ | 0.07 | g/L |
| MnCl₂•4H₂O | 0.36 | g/L |

[0839] To Make 1 L M9 Minimal Media:

[0840] M9 minimal media was made by combining 5×M9 salts, 1M MgSO₄, 20% glucose, 1M CaCl₂ and sterile deionized water. The 5×M9 salts are made by dissolving the following salts in deionized water to a final volume of 1 L: 64 g Na₂HPO₄.7H₂O, 15 g KH₂PO₄, 2.5 g NaCl, 5.0 g NH₄Cl. The salt solution was divided into 200 mL aliquots and sterilized by autoclaving for 15 minutes at 15 psi on the liquid cycle. A 1M solution of MgSO₄ and 1M CaCl₂ were made separately, then sterilized by autoclaving. The glucose was filter sterilized by passing it thought a 0.22 μm filter. All of the components are combined as follows to make 1 L of M9: 750 mL sterile water, 200 mL 5×M9 salts, 2 mL of 1M MgSO₄, 20 mL 20% glucose, 0.1 mL CaCl₂, Q.S. to a final volume of 1 L.

[0841] To Make EZ Rich Media:

[0842] All media components were obtained from TEKnova (Hollister Calif. USA) and combined in the following volumes. 100 mL 10× MOPS mixture, 10 mL 0.132M K₂HPO₄, 100 mL 10× ACGU, 200 mL 5× Supplement EZ, 10 mL 20% glucose, 580 mL sterile water.

[0843] Subsection II: Gel Preparation, DNA Separation, Extraction, Ligation, and Transformation Methods:

[0844] Molecular biology grade agarose (RPI Corp, Mt. Prospect, Ill., USA) is added to 1×TAE to make a 1% Agarose in TAE. To obtain 50×TAE add the following to 900 ml distilled H₂O: 242 g Tris base (RPI Corp, Mt. Prospect, Ill., USA), 57.1 ml Glacial Acetic Acid (Sigma-Aldrich, St. Louis, Mo., USA), 18.6 g EDTA (Fisher Scientific, Pittsburgh, Pa. USA), and adjust volume to 1 L with additional distilled water. To obtain 1×TAE, add 20 mL of 50× TAE to 980 mL of distilled water. The agarose-TAE solution is then heated until boiling occurred and the agarose is fully dissolved. The solution is allowed to cool to 50° C. before 10 mg/mL ethidium bromide (Acros Organics, Morris Plains, N.J., USA) is added at a concentration of 5 ul per 100 mL of 1% agarose solution. Once the ethidium bromide is added, the solution is briefly mixed and poured into a gel casting tray with the appropriate number of combs (Idea Scientific Co., Minneapolis, Minn., USA) per sample analysis. DNA samples are then mixed accordingly with 5× TAE loading buffer. 5× TAE loading buffer consists of 5× TAE(diluted from 50× TAE as described herein), 20% glycerol (Acros Organics, Morris Plains, N.J., USA), 0.125% Bromophenol Blue (Alfa Aesar, Ward Hill, Mass., USA), and adjust volume to 50 mL with distilled water. Loaded gels are then run in gel rigs (Idea Scientific Co., Minneapolis, Minn., USA) filled with 1×TAE at a constant voltage of 125 volts for 25-30 minutes. At this point, the gels are removed from the gel boxes with voltage and visualized under a UV transilluminator (FOTODYNE Inc., Hartland, Wis., USA).

[0845] The DNA isolated through gel extraction is then extracted using the QIAquick Gel Extraction Kit following manufacturer's instructions (Qiagen (Valencia Calif. USA)). Similar methods are known to those skilled in the art.

[0846] The thus-extracted DNA then may be ligated into pSMART (Lucigen Corp, Middleton, Wis., USA), StrataClone (Stratagene, La Jolla, Calif., USA) or pCR2.1-TOPO TA (Invitrogen Corp, Carlsbad, Calif., USA) according to manufacturer's instructions. These methods are described in the next subsection of Common Methods.

[0847] Ligation Methods:

[0848] For Ligations into pSMART Vectors:

[0849] Gel extracted DNA is blunted using PCRTerminator (Lucigen Corp, Middleton, Wis., USA) according to manufacturer's instructions. Then 500 ng of DNA is added to 2.5 uL 4× CloneSmart vector premix, 1 ul CloneSmart DNA ligase (Lucigen Corp, Middleton, Wis., USA) and distilled water is added for a total volume of 10 ul. The reaction is then allowed to sit at room temperature for 30 minutes and then heat inactivated at 70° C. for 15 minutes and then placed on ice. E. cloni 10 G Chemically Competent cells (Lucigen Corp, Middleton, Wis., USA) are thawed for 20 minutes on ice. 40 ul of chemically competent cells are placed into a microcentrifuge tube and 1 ul of heat inactivated CloneSmart Ligation is added to the tube. The whole reaction is stirred briefly with a pipette tip. The ligation and cells are incubated on ice for 30 minutes and then the cells are heat shocked for 45 seconds at 42° C. and then put back onto ice for 2 minutes. 960 ul of room temperature Recovery media (Lucigen Corp, Middleton, Wis., USA) and places into microcentrifuge tubes. Shake tubes at 250 rpm for 1 hour at 37° C. Plate 100 ul of transformed cells on Luria Broth plates (RPI Corp, Mt. Prospect, Ill., USA) plus appropriate antibiotics depending on the pSMART vector used. Incubate plates overnight at 37° C.

[0850] For Ligations into StrataClone:

[0851] Gel extracted DNA is blunted using PCRTerminator (Lucigen Corp, Middleton, Wis., USA) according to manufacturer's instructions. Then 2 ul of DNA is added to 3 ul StrataClone Blunt Cloning buffer and 1 ul StrataClone Blunt vector mix amp/kan (Stratagene, La Jolla, Calif., USA) for a total of 6 ul. Mix the reaction by gently pipeting up at down and incubate the reaction at room temperature for 30 minutes then place onto ice. Thaw a tube of StrataClone chemically competent cells (Stratagene, La Jolla, Calif., USA) on ice for 20 minutes. Add 1 ul of the cloning reaction to the tube of chemically competent cells and gently mix with a pipette tip and incubate on ice for 20 minutes. Heat shock the transformation at 42° C. for 45 seconds then put on ice for 2 minutes. Add 250 ul pre-warmed Luria Broth (RPI Corp, Mt. Prospect, Ill., USA) and shake at 250 rpm for 37° C. for 2 hour. Plate 100 ul of the transformation mixture onto Luria Broth plates (RPI Corp, Mt. Prospect, Ill., USA) plus appropriate antibiotics. Incubate plates overnight at 37° C.

[0852] For Ligations into pCR2.1-TOPO TA:

[0853] Add 1 ul TOPO vector, 1 ul Salt Solution (Invitrogen Corp, Carlsbad, Calif., USA) and 3 ul gel extracted DNA into a microcentrifuge tube. Allow the tube to incubate at room temperature for 30 minutes then place the reaction on ice. Thaw one tube of TOP10F′ chemically competent cells (Invitrogen Corp, Carlsbad, Calif., USA) per reaction. Add 1 ul of reaction mixture into the thawed TOP10F′ cells and mix gently by swirling the cells with a pipette tip and incubate on ice for 20 minutes. Heat shock the transformation at 42° C. for 45 seconds then put on ice for 2 minutes. Add 250 ul pre-warmed SOC media (Invitrogen Corp, Carlsbad, Calif., USA) and shake at 250 rpm for 37° C. for 1 hour. Plate 100 ul of the transformation mixture onto Luria Broth plates (RPI Corp, Mt. Prospect, Ill., USA) plus appropriate antibiotics. Incubate plates overnight at 37° C.

[0854] General Transformation and Related Culture Methodologies:

[0855] Chemically competent transformation protocols are carried out according to the manufacturer's instructions or according to the literature contained in Molecular Cloning (Sambrook and Russell, 2001). Generally, plasmid DNA or ligation products are chilled on ice for 5 to 30 min. in solution with chemically competent cells. Chemically competent cells are a widely used product in the field of biotechnology and are available from multiple vendors, such as those indicated in this Subsection. Following the chilling period cells generally are heat-shocked for 30 seconds at 42° C. without shaking, re-chilled and combined with 250 microliters of rich media, such as S.O.C. Cells are then incubated at 37° C. while shaking at 250 rpm for 1 hour. Finally, the cells are screened for successful transformations by plating on media containing the appropriate antibiotics.

[0856] Alternatively, selected cells may be transformed by electroporation methods such as are known to those skilled in the art.

[0857] The choice of an E. coli host strain for plasmid transformation is determined by considering factors such as plasmid stability, plasmid compatibility, plasmid screening methods and protein expression. Strain backgrounds can be changed by simply purifying plasmid DNA as described herein and transforming the plasmid into a desired or otherwise appropriate E. coli host strain such as determined by experimental necessities, such as any commonly used cloning strain (e.g., DH5α, Top10F′, E. cloni 10G, etc.).

[0858] Plasmid DNA was prepared using the commercial miniprep kit from Qiagen (Valencia, Calif. USA) according to manufacturer's instructions.

[0859] Subsection IIIa. 3-HP Preparation

[0860] A 3-HP stock solution was prepared as follows. A vial of β-propriolactone (Sigma-Aldrich, St. Louis, Mo., USA) was opened under a fume hood and the entire bottle contents was transferred to a new container sequentially using a 25-mL glass pipette. The vial was rinsed with 50 mL of HPLC grade water and this rinse was poured into the new container. Two additional rinses were performed and added to the new container. Additional HPLC grade water was added to the new container to reach a ratio of 50 mL water per 5 mL propriolactone. The new container was capped tightly and allowed to remain in the fume hood at room temperature for 72 hours. After 72 hours the contents were transferred to centrifuge tubes and centrifuged for 10 minutes at 4,000 rpm. Then the solution was filtered to remove particulates and, as needed, concentrated by use of a rotary evaporator at room temperature. Assay for concentration was conducted, and dilution to make a standard concentration stock solution was made as needed.

[0861] Subsection IIIb. HPLC, GC/MS and Other Analytical Methods for 3-HP Detection (Analysis of Cultures for 3-HP Production)

[0862] For HPLC analysis of 3-HP, the Waters chromatography system (Milford, Mass.) consisted of the following: 600S Controller, 616 Pump, 717 Plus Autosampler, 486 Tunable UV Detector, and an in-line mobile phase Degasser. In addition, an Eppendorf external column heater is used and the data are collected using an SRI (Torrance, Calif.) analog-to-digital converter linked to a standard desk top computer. Data are analyzed using the SRI Peak Simple software. A Coregel 64H ion exclusion column (Transgenomic, Inc., San Jose, Calif.) is employed. The column resin is a sulfonated polystyrene divinyl benzene with a particle size of 10 μm and column dimensions are 300×7.8 mm. The mobile phase consisted of sulfuric acid (Fisher Scientific, Pittsburgh, Pa. USA) diluted with deionized (18 MΩcm) water to a concentration of 0.02 N and vacuum filtered through a 0.2 μm nylon filter. The flow rate of the mobile phase is 0.6 mL/min. The UV detector is operated at a wavelength of 210 nm and the column is heated to 60° C. The same equipment and method as described herein is used for 3-HP analyses for relevant prophetic examples. A representative calibration curve using this HPLC method with a 3-HP standard (TCI America, Portland, Oreg.) is provided in FIG. 13.

[0863] The following method is used for GC-MS analysis of 3-HP. Soluble monomeric 3-HP is quantified using GC-MS after a single extraction of the fermentation media with ethyl acetate. Once the 3-HP has been extracted into the ethyl acetate, the active hydrogens on the 3-HP are replaced with trimethylsilyl groups using N,O-Bis-(Trimethylsilyl) trifluoroacetamide to make the compound volatile for GC analysis. A standard curve of known 3-HP concentrations is prepared at the beginning of the run and a known quantity of ketohexanoic acid (1 g/L) is added to both the standards and the samples to act as an internal standard for Quantitation, with tropic acid as an additional internal standard. The 3-HP content of individual samples is then assayed by examining the ratio of the ketohexanoic acid ion (m/z=247) to the 3-HP ion (219) and compared to the standard curve. 3-HP is quantified using a 3HP standard curve at the beginning of the run and the data are analyzed using HP Chemstation. The GC-MS system consists of a Hewlett Packard model 5890 GC and Hewlett Packard model 5972 MS. The column is Supelco SPB-1 (60 m×0.32 mm×0.25 μm film thickness). The capillary coating is a non-polar methylsilicone. The carrier gas is helium at a flow rate of 1 mL/min. The 3-HP as derivatized is separated from other components in the ethyl acetate extract using either of two similar temperature regimes. In a first temperature gradient regime, the column temperature starts with 40° C. for 1 minute, then is raised at a rate of 10° C./minute to 235° C., and then is raised at a rate of 50° C./minute to 300° C. In a second temperature regime, which was demonstrated to process samples more quickly, the column temperature starts with 70° C. which is held for 1 min, followed by a ramp-up of 10° C./minute to 235° C. which is followed by a ramp-up of 50° C./minute to 300° C. A representative calibration curve is provided in FIG. 22.

[0864] A bioassay for detection of 3-HP also was used in various examples. This determination of 3-HP concentration was carried out based on the activity of the E. coli 3-HP dehydrogenase encoded by the ydfG gene (the YDFG protein). Reactions of 200-μl were carried out in 96-well microtiter plates, and contained 100 mM Tris-HCl, pH 8.8, 2.5 mM MgCl₂, 2.625 mM NADP⁺, 3 μg purified YDFG and 20 μl culture supernatant. Culture supernatants were prepared by centrifugation in a microfuge (14,000 rpm, 5 min) to remove cells. A standard curve of 3-HP (containing from 0.025 to 2 g/l) was used in parallel reactions to quantitate the amount of 3-HP in culture supernatants. Uninoculated medium was used as the reagent blank. Where necessary, the culture supernatant was diluted in medium to obtain a solution with 3-HP concentrations within that of the standard curve.

[0865] The reactions were incubated at 37° C. for 1 hr, and 20 μl of color developer containing 1.43 mM nitroblue tetrazolium, 0.143 phenazine methosulfate, and 2.4% bovine serum albumin were added to each reaction. Color development was allowed to proceed at 37° C. for an additional hr, and the absorbance at 580 nm was measured. 3-HP concentration in the culture supernatants was quantitated by comparison with the values obtained from the standard curve generated on the same microtiter plate. The results obtained with the enzymatic assay were verified to match those obtained by one of the analytical methods described above. FIG. 23 provides a representative standard curve.

[0866] Subsection IV. Minimum Inhibitory Concentration Evaluation (MIC) Protocols

[0867] For MIC evaluations, the final results are expressed in chemical agent concentrations determined by analysis of the stock solution by HPLC (i.e., see Subsection IIIb).

[0868] E. coli Aerobic

[0869] The minimum inhibitory concentration (MIC) was determined aerobically in a 96 well-plate format. Plates were setup such that each individual well, when brought to a final volume of 100 uL following inoculation, had the following component levels (corresponding to standard M9 media): 47.7 mM Na₂HPO₄, 22 mM KH₂PO₄, 8.6 mM NaCl, 18.7 mM NH₄Cl, 2 mM MgSO₄, 0.1 mM CaCl₂, and 0.4% glucose. Media supplements were added according to levels reported in the Supplements Table, where specified. Overnight cultures of strains were grown in triplicate in 5 mL LB (with antibiotic where appropriate). A 1% (v/v) inoculum was introduced into a 5 ml culture of M9 minimal media. After the cells reached mid-exponential phase, the culture was diluted to an OD₆₀₀ of about 0.200 (i.e., 0.195-0.205. The cells were further diluted 1:50 and a 10 μL aliquot was used to inoculate each well of a 96 well plate (˜10⁴ cells per well) to total volume of 100 uL. The plate was arranged to measure the growth of variable strains or growth conditions in increasing 3-HP concentrations, 0 to 60 g/L, in 5 g/L increments. Plates were incubated for 24 hours at 37 C. The minimum inhibitory 3-HP concentration and maximum 3-HP concentration corresponding to visible cell growth (OD˜0.1) was recorded after 24 hours. For cases when MIC>60 g/L, assessments were performed in plates with extended 3-HP concentrations (0-100 g/L, in 5 g/L increments).

[0870] E. coli Anaerobic

[0871] The minimum inhibitory concentration (MIC) was determined anaerobically in a 96 well-plate format. Plates were setup such that each individual well, when brought to a final volume of 100 uL following inoculation, had the following component levels (corresponding to standard M9 media): 47.7 mM Na₂HPO₄, 22 mM KH₂PO₄, 8.6 mM NaCl, 18.7 mM NH₄Cl, 2 mM MgSO₄, 0.1 mM CaCl₂, and 0.4% glucose. Media supplements were added according to levels reported in the Supplements Table, where specified. Overnight cultures of strains were grown in triplicate in 5 mL LB (with antibiotic where appropriate). A 1% (v/v) inoculum was introduced into a 5 ml culture of M9 minimal media. After the cells reached mid-exponential phase, the culture was diluted to an OD₆₀₀ of about 0.200 (i.e., 0.195-0.205. The cells were further diluted 1:50 and a 10 μL aliquot was used to inoculate each well of a 96 well plate (˜10⁴ cells per well) to total volume of 100 uL. The plate was arranged to measure the growth of variable strains or growth conditions in increasing 3-HP concentrations, 0 to 60 g/L, in 5 g/L increments. Plates were sealed in biobag anaerobic chambers that contained gas generators for anaerobic conditions and incubated for 24 hours at 37 C. The minimum inhibitory 3-HP concentration and maximum 3-HP concentration corresponding to visible cell growth (OD˜0.1) was recorded after 24 hours. For cases when MIC>60 g/L, assessments were performed in plates with extended 3-HP concentrations (0-100 g/L, in 5 g/L increments).

[0872] B. subtilis Aerobic

[0873] The minimum inhibitory concentration (MIC) was determined aerobically in a 96 well-plate format. Plates were setup such that each individual well, when brought to a final volume of 100 uL following inoculation, had the following component levels (corresponding to standard M9 media+supplemental glutamate): 47.7 mM Na₂HPO₄, 22 mM KH₂PO₄, 8.6 mM NaCl, 18.7 mM NH₄Cl, 2 mM MgSO₄, 0.1 mM CaCl₂, 10 mM glutamate and 0.4% glucose. Media supplements were added according to levels reported in the Supplements Table where specified. Overnight cultures of strains were grown in triplicate in 5 mL LB (with antibiotic where appropriate). A 1% (v/v) inoculum was introduced into a 5 ml culture of M9 minimal media+glutamate. After the cells reached mid-exponential phase, the culture was diluted to an OD₆₀₀ of about 0.200 (i.e., 0.195-0.205. The cells were further diluted 1:50 and a 10 μL aliquot was used to inoculate each well of a 96 well plate (˜10⁴ cells per well) to total volume of 100 uL. The plate was arranged to measure the growth of variable strains or growth conditions in increasing 3-HP concentrations, 0 to 60 g/L, in 5 g/L increments. Plates were incubated for 24 hours at 37 C. The minimum inhibitory 3-HP concentration and maximum 3-HP concentration corresponding to visible cell growth (OD˜0.1) was recorded after 24 hours. For cases when MIC>60 g/L, assessments were performed in plates with extended 3-HP concentrations (0-100 g/L, in 5 g/L increments).

[0874] C. necator (R. eutropha) Aerobic

[0875] The minimum inhibitory concentration (MIC) was determined aerobically in a 96 well-plate format. Plates were setup such that each individual well, when brought to a final volume of 100 uL following inoculation, had the following component levels (corresponding to FGN media): 21.5 mM K₂HPO₄, 8.5 mM KH₂PO₄, 18 mM NH₄Cl, 12 mM NaCl, 7.3 uM ZnCl, 0.15 uM MnCl₂, 4.85 uM H₃BO₃, 0.21 uM CoCl₂, 0.41 uM CuCl₂, 0.50 uM NiCl₂, 0.12 uM Na₂MoO₄, 0.19 uM CrCl₃, 0.06 mM CaCl₂, 0.5 mM MgSO₄, 0.06 mM FeSO₄, 0.2% glycerol, 0.2% fructose. Media supplements were added according to levels reported in Supplements Table, where specified. Overnight cultures of strains were grown in triplicate in 5 mL LB (with antibiotic where appropriate). A 1% (v/v) inoculum was introduced into a 5 ml culture of FGN media. After the cells reached mid-exponential phase, the culture was diluted to an OD₆₀₀ of about 0.200 (i.e., 0.195-0.205. The cells were further diluted 1:50 and a 10 μL aliquot was used to inoculate each well of a 96 well plate (˜10⁴ cells per well) to total volume of 100 uL. The plate was arranged to measure the growth of variable strains or growth conditions in increasing 3-HP concentrations, 0 to 60 g/L, in 5 g/L increments. Plates were incubated for 24 hours at 30 C. The minimum inhibitory 3-HP concentration and maximum 3-HP concentration corresponding to visible cell growth (OD˜0.1) was recorded after 24 hours. For cases when MIC>60 g/L, assessments were performed in plates with extended 3-HP concentrations (0-100 g/L, in 5 g/L increments).

[0876] The embodiments, variations, sequences, and figures described herein should provide an indication of the utility and versatility of the present invention. Other embodiments that do not provide all of the features and advantages set forth herein may also be utilized, without departing from the spirit and scope of the present invention. Such modifications and variations are considered to be within the scope of the invention.

The application's sequence listing, which the Patent Office published only in electronic form, follows.

SEQUENCE LISTING (906 sequences)

SEQ ID NO: 1 - DNA, 5642 bp, Artificial Sequence
  Description of Artificial Sequence: Synthetic polynucleotide
tcagaagcgggtatctaccgcagaggcgagtttttcgaccaggcgttcggtatcctcccagcccagacacgggtcggtaatggattgaccgtaagtgagcggctgactgccgacgattttttgcgttccttcgcgcaggaaactttccgccataattccagcaatcgccgtagagccattgcggatttgctgacaaatatcctcacaaacttctaactggcgacggtgctgcttctggcagttaccgtggctgaaatccaccaccagatgttcaggtaaatcaaactcgtgcagcgtatcgcaggctgcggcgatatcatcggcatgataattcggttttttgccgccacgcataataatgtggccatacgggttgccgctggtctgatagatggtcatctgaccatttttgtctggcgagaggaacatatggctggcgcgggctgcgcggatagcatccacagcaatccgcgtattgccatcggtaccatttttaaaacctaccggacaggagagtgccgaagccatttcgcggtggatctgactttcggtagtacgtgcgccaatcgcgccccaactgattaaatcagcaataaactgaccggtcaccatatcgaggaactcggtcgcggttgggacgcccagctcatttacctgtaaaagtaatttgcgcgccagctccagaccgtgatttacccgatagctgccgtttaaatctggatcggagattagtcctttccagccgacaacagttcgtggtttttcaaaataggtgcgcattacgatttccagccgtgactggtactggttgcgcagcgactgcagacgggtggcgtactccattgcagcggtgagatcgtggatcgagcaggggccaataatgaccaacagtcgcttatcttcaccattcagtattttttcaattctgcggcgggagtcggtgacatgggtggcgacgccaggcgttacgggataccgtagcgcgagttcggcgggcgttaccaggctctcaatacgcgcagtacggagttcgtcagttctgttcattacaagtctcagggaattctgtttcctgtgtgaaattgttatccgctcacaattccacacattatacgagccgatgattaattgtcaacagctcatttcagaatatttgccagaaccgttatgatgtcggcgcaaaaaacattatccagaacgggagtgcgccttgagcgacacgaattatgcagtgatttacgacctgcacagccataccacagcttccgatggctgcctgacgccagaagcattggtgcaccgtgcagtcgataagcccggatcctctacgccggacgcatcgtggccggcatcaccggcgccacaggtgcggttgctggcgcctatatcgccgacatcaccgatggggaagatcgggctcgccacttcgggctcatgagcgcttgtttcggcgtgggtatggtggcaggccccgtggccgggggactgttgggcgccatctccttgcatgcaccattccttgcggcggcggtgctcaacggcctcaacctactactgggctgcttcctaatgcaggagtcgcataagggagagcgtcgaccgatgcccttgagagccttcaacccagtcagctccttccggtgggcgcggggcatgactatcgtcgccgcacttatgactgtcttctttatcatgcaactcgtaggacaggtgccggcagcgctctgggtcattttcggcgaggaccgctttcgctggagcgcgacgatgatcggcctgtcgcttgcggtattcggaatcttgcacgccctcgctcaagccttcgtcactggtcccgccaccaaacgtttcggcgagaagcaggccattatcgccggcatggcggccgacgcgctgggctacgtcttgctggcgttcgcgacgcgaggctggatggccttccccattatgattcttctcgcttccggcggcatcgggatgcccgcgttgcaggccatgctgtccaggcaggtagatgacgaccatcagggacagcttcaaggatcgctcgcggctcttaccagcctaacttcgatcactggaccgctgatcgtcacggcgatttatgccgcctcggcgagcacatggaacgggttggcatggattgtaggcgccgccctataccttgtctgcctccccgcgttgcgtcgcggtgcatggagccgggccacctcgacctgaatggaagccggcggcacctcgctaacggattcaccactccaagaattggagccaatcaattcttgcggagaactgtgaatgcgcaaaccaacccttggcagaacatatccatcgcgtccgccatctccagcagccgcacgcggcgcatctcgggcagcgttgggtcctggccacgggtgcgcatgatcgtgctcctgtcgttgaggacccggctaggctggcggggttgccttactggttagcagaatgaatcaccgatacgcgagcgaacgtgaagcgactgctgctgcaaaacgtctgcgacctgagcaacaacatgaatggtcttcggtttccgtgtttcgtaaagtctggaaacgcggaagtcagcgccctgcaccattatgttccggatctgcatcgcaggatgctgctggctaccctgtggaacacctacatctgtattaacgaagcgctggcattgaccctgagtgatttttctctggtcccgccgcatccataccgccagttgtttaccctcacaacgttccagtaaccgggcatgttcatcatcagtaacccgtatcgtgagcatcctctctcgtttcatcggtatcattacccccatgaacagaaatcccccttacacggaggcatcagtgaccaaacaggaaaaaaccgcccttaacatggcccgctttatcagaagccagacattaacgcttctggagaaactcaacgagctggacgcggatgaacaggcagacatctgtgaatcgcttcacgaccacgctgatgagctttaccgcagctgcctcgcgcgtttcggtgatgacggtgaaaacctctgacacatgcagctcccggagacggtcacagcttgtctgtaagcggatgccgggagcagacaagcccgtcagggcgcgtcagcgggtgttggcgggtgtcggggcgcagccatgacccagtcacgtagcgatagcggagtgtatactggcttaactatgcggcatcagagcagattgtactgagagtgcaccatatgcggtgtgaaataccgcacagatgcgtaaggagaaaataccgcatcaggcgctcttccgcttcctcgctcactgactcgctgcgctcggtcgttcggctgcggcgagcggtatcagctcactcaaaggcggtaatacggttatccacagaatcaggggataacgcaggaaagaacatgtgagcaaaaggccagcaaaaggccaggaaccgtaaaaaggccgcgttgctggcgtttttccataggctccgcccccctgacgagcatcacaaaaatcgacgctcaagtcagaggtggcgaaacccgacaggactataaagataccaggcgtttccccctggaagctccctcgtgcgctctcctgttccgaccctgccgcttaccggatacctgtccgcctttctcccttcgggaagcgtggcgctttctcaatgctcacgctgtaggtatctcagttcggtgtaggtcgttcgctccaagctgggctgtgtgcacgaaccccccgttcagcccgaccgctgcgccttatccggtaactatcgtcttgagtccaacccggtaagacacgacttatcgccactggcagcagccactggtaacaggattagcagagcgaggtatgtaggcggtgctacagagttcttgaagtggtggcctaactacggctacactagaaggacagtatttggtatctgcgctctgctgaagccagttaccttcggaaaaagagttggtagctcttgatccggcaaacaaaccaccgctggtagcggtggtttttttgtttgcaagcagcagattacgcgcagaaaaaaaggatctcaagaagatcctttgatcttttctacggggtctgacgctcagtggaacgaaaactcacgttaagggattttggtcatgagattatcaaaaaggatcttcacctagatccttttaaattaaaaatgaagttttaaatcaatctaaagtatatatgagtaaacttggtctgacagttaccaatgcttaatcagtgaggcacctatctcagcgatctgtctatttcgttcatccatagttgcctgactccccgtcgtgtagataactacgatacgggagggcttaccatctggccccagtgctgcaatgataccgcgagacccacgctcaccggctccagatttatcagcaataaaccagccagccggaagggccgagcgcagaagtggtcctgcaactttatccgcctccatccagtctattaattgttgccgggaagctagagtaagtagttcgccagttaatagtttgcgcaacgttgttgccattgctacagcatcgtggtgtcacgctcgtcgtttggtatggcttcattcagctccggttcccaacgatcaaggcgagttacatgatcccccatgttgtgcaaaaaagcggttagctccttcggtcctccgatcgttgtcagaagtaagttggccgcagtgttatcactcatggttatggcagcactgcataattctcttactgtcatgccatccgtaagatgcttttctgtgactggtgagtactcaaccaagtcattctgagaatagtgtatgcggcgaccgagttgctcttgcccggcgtcaacacgggataataccgcgccacatagcagaactttaaaagtgctcatcattggaaaacgttcttcggggcgaaaactctcaaggatcttaccgctgttgagatccagttcgatgtaacccactcgtgcacccaactgatcttcagcatcttttactttcaccagcgtttctgggtgagcaaaaacaggaaggcaaaatgccgcaaaaaagggaataagggcgacacggaaatgttgaatactcatactcttcctttttcaatattattgaagcatttatcagggttattgtctcatgagcggatacatatttgaatgtatttagaaaaataaacaaaagagtttgtagaaacgcaaaaaggccatccgtcaggatggccttctgcttaatttgatgcctggcagtttatggcgggcgtcctgcccgccaccctccgggccgttgcttcgcaacgttcaaatccgctcccggcggatttgtcctactcaggagagcgttcaccgacaaacaacagataaaacgaaaggcccagtctttcgactgagcctttcgttttatttgatgcctggcagttccctactctcgcatggggagaccccacactaccatcggcgctacggcgtttcacttctgagttcggcatggggtcaggtgggaccaccgcgctactgccgccaggcaaattctgttttatcagaccgcttctgcgttctgatttaatctgtatcaggctgaaaatcttctctcatccgccaaaacagccaagcttggctgcaggtcgacggatcccc

SEQ ID NO: 2 - DNA, 3082 bp, Artificial Sequence
  Description of Artificial Sequence: Synthetic polynucleotide
gcaatatcgtcccttcctacgggccggaacccggtggcgtttctgcttcggtggagtatgccgtcgctgcgcttcgggtatctgacattgtgatttgtggtcattccaactgtggcgcgatgaccgccattgccagctgtcagtgcatggaccatatgcctgccgtctcccactggctgcgttatgccgattcagcccgcgtcgttaatgaggcgcgcccgcattccgatttaccgtcaaaagctgcggcgatggtacgtgaaaacgtcattgctcagttggctaatttgcaaactcatccatcggtgcgcctggcgctcgaagaggggcggatcgccctgcacggctgggtctacgacattgaaagcggcagcatcgcagcttttgacggcgcaacccgccagtttgtgccactggccgctaatcctcgcgtttgtgccataccgctacgccaaccgaccgcagcgtaaccttatttttaaaccatcaggagttccaccatgattcagtcacaaattaaccgcaatattcgtcttgatcttgccgatgccattttgctcagcaaagctaaaaaagatctctcatttgccgagattgccgacggcaccggtctggcagaagcctttgtaaccgcggctttgctgggtcagcaggcgcttcctgccgacgccgcccgcctggtcggggcgaagctggatctcgacgaagactccattctactgttgcagatgattccactgcgtggctgcattgatgaccgtattccaactgacccaacgatgtatcgtttctatgaaatgttgcaggtgtacggtacaaccctgaaagcgttggttcatgagaaatttggcgatggcattattagcgcgattaacttcaaactcgacgttaagaaagtggcggacccggaaggtggcgaacgtgcggtcatcaccttagatggtaaatatctgccgaccaaaccgttctgacagccatgcgcaaccatcaaaagacgttcacgatgctgctggtactggtgctgattggtcttaatatgcgaccactgctcacctccgtcgggccactgctaccgcaattgcgccaggcgagcggaatgagagacgaattctctagatatcgctcaatactgaccatttaaatcatacctgacctccatagcagaaagtcaaaagcctccgaccggaggcttttgacttgatcggcacgtaagaggttccaactttcaccataatgaaataagatcactaccgggcgtattttttgagttatcgagattttcaggagctaaggaagctaaaatgagccatattcaacgggaaacgtcttgctcgaggccgcgattaaattccaacatggatgctgatttatatgggtataaatgggctcgcgataatgtcgggcaatcaggtgcgacaatctatcgattgtatgggaagcccgatgcgccagagttgtttctgaaacatggcaaaggtagcgttgccaatgatgttacagatgagatggtcaggctaaactggctgacggaatttatgcctcttccgaccatcaagcattttatccgtactcctgatgatgcatggttactcaccactgcgatcccagggaaaacagcattccaggtattagaagaatatcctgattcaggtgaaaatattgttgatgcgctggcagtgttcctgcgccggttgcattcgattcctgtttgtaattgtccttttaacggcgatcgcgtatttcgtctcgctcaggcgcaatcacgaatgaataacggtttggttggtgcgagtgattttgatgacgagcgtaatggctggcctgttgaacaagtctggaaagaaatgcataagcttttgccattctcaccggattcagtcgtcactcatggtgatttctcacttgataaccttatttttgacgaggggaaattaataggttgtattgatgttggacgagtcggaatcgcagaccgataccaggatcttgccatcctatggaactgcctcggtgagttttctccttcattacagaaacggctttttcaaaaatatggtattgataatcctgatatgaataaattgcagtttcacttgatgctcgatgagtttttctaaatgaccaaacaggaaaaaaccgcccttaacatggcccgctttatcagaagccagacattaacgcttctggagaaactcaacgagctggacgcggatgaacaggcagacatctgtgaatcgcttcacgaccacgctgatgagctttaccgcagctgcctcgcgcgtttcggtgatgacggtgaaaacctctgatgagggcccaaatgtaatcacctggctcaccttcgggtgggcctttctgcgttgctggcgtttttccataggctccgcccccctgacgagcatcacaaaaatcgatgctcaagtcagaggtggcgaaacccgacaggactataaagataccaggcgtttccccctggaagctccctcgtgcgctctcctgttccgaccctgccgcttaccggatacctgtccgcctttctcccttcgggaagcgtggcgctttctcatagctcacgctgtaggtatctcagttcggtgtaggtcgttcgctccaagctgggctgtgtgcacgaaccccccgttcagcccgaccgctgcgccttatccggtaactatcgtcttgagtccaacccggtaagacacgacttatcgccactggcagcagccactggtaacaggattagcagagcgaggtatgtaggcggtgctacagagttcttgaagtggtggcctaactacggctacactagaagaacagtatttggtatctgcgctctgctgaagccagttacctcggaaaaagagttggtagctcttgatccggcaaacaaaccaccgctggtagcggtggtttttttgtttgcaagcagcagattacgcgcagaaaaaaaggatctcaagaagatcctttgattttctaccgaagaaaggcccacccgtgaaggtgagccagtgagttgattgcagtccagttacgctggagtctgaggctcgtcctgaatgatatcaagcttgaattcgtt

SEQ ID NO: 3 - DNA, 8252 bp, Artificial Sequence
  Description of Artificial Sequence: Synthetic polynucleotide
gaattccgctagcaggagctaaggaagctaaaatgtccggtacgggtcgtttggctggtaaaattgcattgatcaccggtggtgctggtaacattggttccgagctgacccgccgttttctggccgagggtgcgacggttattatcagcggccgtaaccgtgcgaagctgaccgcgctggccgagcgcatgcaagccgaggccggcgtgccggccaagcgcattgatttggaggtgatggatggttccgaccctgtggctgtccgtgccggtatcgaggcaatcgtcgctcgccacggtcagattgacattctggttaacaacgcgggctccgccggtgcccaacgtcgcttggcggaaattccgctgacggaggcagaattgggtccgggtgcggaggagactttgcacgcttcgatcgcgaatctgttgggcatgggttggcacctgatgcgtattgcggctccgcacatgccagttggctccgcagttatcaacgtttcgactattttctcgcgcgcagagtactatggtcgcattccgtacgttaccccgaaggcagcgctgaacgctttgtcccagctggctgcccgcgagctgggcgctcgtggcatccgcgttaacactattttcccaggtcctattgagtccgaccgcatccgtaccgtgtttcaacgtatggatcaactgaagggtcgcccggagggcgacaccgcccatcactttttgaacaccatgcgcctgtgccgcgcaaacgaccaaggcgctttggaacgccgctttccgtccgttggcgatgttgctgatgcggctgtgtttctggcttctgctgagagcgcggcactgtcgggtgagacgattgaggtcacccacggtatggaactgccggcgtgtagcgaaacctccttgttggcgcgtaccgatctgcgtaccatcgacgcgagcggtcgcactaccctgatttgcgctggcgatcaaattgaagaagttatggccctgacgggcatgctgcgtacgtgcggtagcgaagtgattatcggcttccgttctgcggctgccctggcgcaatttgagcaggcagtgaatgaatctcgccgtctggcaggtgcggatttcaccccgccgatcgctttgccgttggacccacgtgacccggccaccattgatgcggttttcgattggggcgcaggcgagaatacgggtggcatccatgcggcggtcattctgccggcaacctcccacgaaccggctccgtgcgtgattgaagtcgatgacgaacgcgtcctgaatttcctggccgatgaaattaccggcaccatcgttattgcgagccgtttggcgcgctattggcaatcccaacgcctgaccccgggtgcccgtgcccgcggtccgcgtgttatctttctgagcaacggtgccgatcaaaatggtaatgtttacggtcgtattcaatctgcggcgatcggtcaattgattcgcgtttggcgtcacgaggcggagttggactatcaacgtgcatccgccgcaggcgatcacgttctgccgccggtttgggcgaaccagattgtccgtttcgctaaccgctccctggaaggtctggagttcgcgtgcgcgtggaccgcacagctgctgcacagccaacgtcatattaacgaaattacgctgaacattccagccaatattagcgcgaccacgggcgcacgttccgccagcgtcggctgggccgagtccttgattggtctgcacctgggcaaggtggctctgattaccggtggttcggcgggcatcggtggtcaaatcggtcgtctgctggccttgtctggcgcgcgtgtgatgctggccgctcgcgatcgccataaattggaacagatgcaagccatgattcaaagcgaattggcggaggttggttataccgatgtggaggaccgtgtgcacatcgctccgggttgcgatgtgagcagcgaggcgcagctggcagatctggtggaacgtacgctgtccgcattcggtaccgtggattatttgattaataacgccggtattgcgggcgtggaggagatggtgatcgacatgccggtggaaggctggcgtcacaccctgtttgccaacctgatttcgaattattcgctgatgcgcaagttggcgccgctgatgaagaagcaaggtagcggttacatcctgaacgtttcttcctattttggcggtgagaaggacgcggcgattccttatccgaaccgcgccgactacgccgtctccaaggctggccaacgcgcgatggcggaagtgttcgctcgtttcctgggtccagagattcagatcaatgctattgccccaggtccggttgaaggcgaccgcctgcgtggtaccggtgagcgtccgggcctgtttgctcgtcgcgcccgtctgatcttggagaataaacgcctgaacgaattgcacgcggctttgattgctgcggcccgcaccgatgagcgctcgatgcacgagttggttgaattgttgctgccgaacgacgtggccgcgttggagcagaacccagcggcccctaccgcgctgcgtgagctggcacgccgcttccgtagcgaaggtgatccggcggcaagctcctcgtccgccttgctgaatcgctccatcgctgccaagctgttggctcgcttgcataacggtggctatgtgctgccggcggatatttttgcaaatctgcctaatccgccggacccgttctttacccgtgcgcaaattgaccgcgaagctcgcaaggtgcgtgatggtattatgggtatgctgtatctgcagcgtatgccaaccgagtttgacgtcgctatggcaaccgtgtactatctggccgatcgtaacgtgagcggcgaaactttccatccgtctggtggtttgcgctacgagcgtaccccgaccggtggcgagctgttcggcctgccatcgccggaacgtctggcggagctggttggtagcacggtgtacctgatcggtgaacacctgaccgagcacctgaacctgctggctcgtgcctatttggagcgctacggtgcccgtcaagtggtgatgattgttgagacggaaaccggtgcggaaaccatgcgtcgtctgttgcatgatcacgtcgaggcaggtcgcctgatgactattgtggcaggtgatcagattgaggcagcgattgaccaagcgatcacgcgctatggccgtccgggtccggtggtgtgcactccattccgtccactgccaaccgttccgctggtcggtcgtaaagactccgattggagcaccgttttgagcgaggcggaatttgcggaactgtgtgagcatcagctgacccaccatttccgtgttgctcgtaagatcgccttgtcggatggcgcgtcgctggcgttggttaccccggaaacgactgcgactagcaccacggagcaatttgctctggcgaacttcatcaagaccaccctgcacgcgttcaccgcgaccatcggtgttgagtcggagcgcaccgcgcaacgtattctgattaaccaggttgatctgacgcgccgcgcccgtgcggaagagccgcgtgacccgcacgagcgtcagcaggaattggaacgcttcattgaagccgttctgctggttaccgctccgctgcctcctgaggcagacacgcgctacgcaggccgtattcaccgcggtcgtgcgattaccgtctaatagaagcttggctgttttggcggatgagagaagattttcagcctgatacagattaaatcagaacgcagaagcggtctgataaaacagaatttgcctggcggcagtagcgcggtggtcccacctgaccccatgccgaactcagaagtgaaacgccgtagcgccgatggtagtgtggggtctccccatgcgagagtagggaactgccaggcatcaaataaaacgaaaggctcagtcgaaagactgggcctttcgttttatctgttgtttgtcggtgaacgctctcctgagtaggacaaatccgccgggagcggatttgaacgttgcgaagcaacggcccggagggtggcgggcaggacgcccgccataaactgccaggcatcaaattaagcagaaggccatcctgacggatggcctttttgcgtttctacaaactcttttgtttatttttctaaatacattcaaatatgtatccgctcatgagacaataaccctgataaatgcttcaataatattgaaaaaggaagagtatgagtattcaacatttccgtgtcgcccttattcccttttttgcggcattttgccttcctgtttttgctcacccagaaacgctggtgaaagtaaaagatgctgaagatcagttgggtgcacgagtgggttacatcgaactggatctcaacagcggtaagatccttgagagttttcgccccgaagaacgttttccaatgatgagcacttttaaagttctgctatgtggcgcggtattatcccgtgttgacgccgggcaagagcaactcggtcgccgcatacactattctcagaatgacttggttgagtactcaccagtcacagaaaagcatcttacggatggcatgacagtaagagaattatgcagtgctgccataaccatgagtgataacactgcggccaacttacttctgacaacgatcggaggaccgaaggagctaaccgcttttttgcacaacatgggggatcatgtaactcgccttgatcgttgggaaccggagctgaatgaagccataccaaacgacgagcgtgacaccacgatgctgtagcaatggcaacaacgttgcgcaaactattaactggcgaactacttactctagcttcccggcaacaattaatagactggatggaggcggataaagttgcaggaccacttctgcgctcggcccttccggctggctggtttattgctgataaatctggagccggtgagcgtgggtctcgcggtatcattgcagcactggggccagatggtaagccctcccgtatcgtagttatctacacgacggggagtcaggcaactatggatgaacgaaatagacagatcgctgagataggtgcctcactgattaagcattggtaactgtcagaccaagtttactcatatatactttagattgatttaaaacttcatttttaatttaaaaggatctaggtgaagatcctttttgataatctcatgaccaaaatcccttaacgtgagttttcgttccactgagcgtcagaccccgtagaaaagatcaaaggatcttcttgagatcctttttttctgcgcgtaatctgctgcttgcaaacaaaaaaaccaccgctaccagcggtggtttgtttgccggatcaagagctaccaactctttttccgaaggtaactggcttcagcagagcgcagataccaaatactgtccttctagtgtagccgtagttaggccaccacttcaagaactctgtagcaccgcctacatacctcgctctgctaatcctgttaccagtggctgctgccagtggcgataagtcgtgtcttaccgggttggactcaagacgatagttaccggataaggcgcagcggtcgggctgaacggggggttcgtgcacacagcccagcttggagcgaacgacctacaccgaactgagatacctacagcgtgagcattgagaaagcgccacgcttcccgaagggagaaaggcggacaggtatccggtaagcggcagggtcggaacaggagagcgcacgagggagcttccagggggaaacgcctggtatctttatagtcctgtcgggtttcgccacctctgacttgagcgtcgatttttgtgatgctcgtcaggggggcggagcctatggaaaaacgccagcaacgcggcctttttacggttcctggccttttgctggccttttgctcacatgttctttcctgcgttatcccctgattctgtggataaccgtattaccgcctttgagtgagctgataccgctcgccgcagccgaacgaccgagcgcagcgagtcagtgagcgaggaagcggaagagcgcctgatgcggtattttctccttacgcatctgtgcggtatttcacaccgcatatggtgcactctcagtacaatctgctctgatgccgcatagttaagccagtatacactccgctatcgctacgtgactgggtcatggctgcgccccgacacccgccaacacccgctgacgcgccctgacgggcttgtctgctcccggcatccgcttacagacaagctgtgaccgtctccgggagctgcatgtgtcagaggttttcaccgtcatcaccgaaacgcgcgaggcagctgcggtaaagctcatcagcgtggtcgtgaagcgattcacagatgtctgcctgttcatccgcgtccagctcgttgagtttctccagaagcgttaatgtctggcttctgataaagcgggccatgttaagggcggttttttcctgtttggtcactgatgcctccgtgtaagggggatttctgttcatgggggtaatgataccgatgaaacgagagaggatgctcacgatacgggttactgatgatgaacatgcccggttactggaacgttgtgagggtaaacaactggcggtatggatgcggcgggaccagagaaaaatcactcagggtcaatgccagcgcttcgttaatacagatgtaggtgttccacagggtagccagcagcatcctgcgatgcagatccggaacataatggtgcagggcgctgacttccgcgtttccagactttacgaaacacggaaaccgaagaccattcatgttgttgctcaggtcgcagacgttttgcagcagcagtcgcttcacgttcgctcgcgtatcggtgattcattctgctaaccagtaaggcaaccccgccagcctagccgggtcctcaacgacaggagcacgatcatgcgcacccgtggccaggacccaacgctgcccgagatgcgccgcgtgcggctgctggagatggcggacgcgatggatatgttctgccaagggttggtttgcgcattcacagttctccgcaagaattgattggctccaattcttggagtggtgaatccgttagcgaggtgccgccggcttccattcaggtcgaggtggcccggctccatgcaccgcgacgcaacgcggggaggcagacaaggtatagggcggcgcctacaatccatgccaacccgttccatgtgctcgccgaggcggcataaatcgccgtgacgatcagcggtccagtgatcgaagttaggctggtaagagccgcgagcgatccttgaagctgtccctgatggtcgtcatctacctgcctggacagcatggcctgcaacgcgggcatcccgatgccgccggaagcgagaagaatcataatggggaaggccatccagcctcgcgtcgcgaacgccagcaagacgtagcccagcgcgtcggccgccatgccggcgataatggcctgcttctcgccgaaacgtttggtggcgggaccagtgacgaaggcttgagcgagggcgtgcaagattccgaataccgcaagcgacaggccgatcatcgtcgcgctccagcgaaagcggtcctcgccgaaaatgacccagagcgctgccggcacctgtcctacgagttgcatgataaagaagacagtcataagtgcggcgacgatagtcatgccccgcgcccaccggaaggagctgactgggttgaaggctctcaagggcatcggtcgacgctctcccttatgcgactcctgcattaggaagcagcccagtagtaggttgaggccgttgagcaccgccgccgcaaggaatggtgcatgcaaggagatggcgcccaacagtcccccggccacggggcctgccaccatacccacgccgaaacaagcgctcatgagcccgaagtggcgagcccgatcttccccatcggtgatgtcggcgatataggcgccagcaaccgcacctgtggcgccggtgatgccggccacgatgcgtccggcgtagaggatccgggcttatcgactgcacggtgcaccaatgcttctggcgtcaggcagccatcggaagctgtggtatggctgtgcaggtcgtaaatcactgcataattcgtgtcgctcaaggcgcactcccgttctggataatgttttttgcgccgacatcataacggttctggcaaatattctgaaatgagctgttgacaattaatcatcggctcgtataatgtgtggaattgtgagcggataacaatttcacacaggaaaca

SEQ ID NO: 4 - DNA, 8258 bp, Artificial Sequence
  Description of Artificial Sequence: Synthetic polynucleotide
ttctgtttcctgtgtgaaattgttatccgctcacaattccacacattatacgagccgatgattaattgtcaacagctcatttcagaatatttgccagaaccgttatgatgtcggcgcaaaaaacattatccagaacgggagtgcgccttgagcgacacgaattatgcagtgatttacgacctgcacagccataccacagcttccgatggctgcctgacgccagaagcattggtgcaccgtgcagtcgataagcccggatcctctacgccggacgcatcgtggccggcatcaccggcgccacaggtgcggttgctggcgcctatatcgccgacatcaccgatggggaagatcgggctcgccacttcgggctcatgagcgcttgtttcggcgtgggtatggtggcaggccccgtggccgggggactgttgggcgccatctccttgcatgcaccattccttgcggcggcggtgctcaacggcctcaacctactactgggctgcttcctaatgcaggagtcgcataagggagagcgtcgaccgatgcccttgagagccttcaacccagtcagctccttccggtgggcgcggggcatgactatcgtcgccgcacttatgactgtcttctttatcatgcaactcgtaggacaggtgccggcagcgctctgggtcattttcggcgaggaccgctttcgctggagcgcgacgatgatcggcctgtcgcttgcggtattcggaatcttgcacgccctcgctcaagccttcgtcactggtcccgccaccaaacgtttcggcgagaagcaggccattatcgccggcatggcggccgacgcgctgggctacgtcttgctggcgttcgcgacgcgaggctggatggccttccccattatgattcttctcgcttccggcggcatcgggatgcccgcgttgcaggccatgctgtccaggcaggtagatgacgaccatcagggacagcttcaaggatcgctcgcggctcttaccagcctaacttcgatcactggaccgctgatcgtcacggcgatttatgccgcctcggcgagcacatggaacgggttggcatggattgtaggcgccgccctataccttgtctgcctccccgcgttgcgtcgcggtgcatggagccgggccacctcgacctgaatggaagccggcggcacctcgctaacggattcaccactccaagaattggagccaatcaattcttgcggagaactgtgaatgcgcaaaccaacccttggcagaacatatccatcgcgtccgccatctccagcagccgcacgcggcgcatctcgggcagcgttgggtcctggccacgggtgcgcatgatcgtgctcctgtcgttgaggacccggctaggctggcggggttgccttactggttagcagaatgaatcaccgatacgcgagcgaacgtgaagcgactgctgctgcaaaacgtctgcgacctgagcaacaacatgaatggtcttcggtttccgtgtttcgtaaagtctggaaacgcggaagtcagcgccctgcaccattatgttccggatctgcatcgcaggatgctgctggctaccctgtggaacacctacatctgtattaacgaagcgctggcattgaccctgagtgatttttctctggtcccgccgcatccataccgccagttgtttaccctcacaacgttccagtaaccgggcatgttcatcatcagtaacccgtatcgtgagcatcctctctcgtttcatcggtatcattacccccatgaacagaaatcccccttacacggaggcatcagtgaccaaacaggaaaaaaccgcccttaacatggcccgctttatcagaagccagacattaacgcttctggagaaactcaacgagctggacgcggatgaacaggcagacatctgtgaatcgcttcacgaccacgctgatgagctttaccgcagctgcctcgcgcgtttcggtgatgacggtgaaaacctctgacacatgcagctcccggagacggtcacagcttgtctgtaagcggatgccgggagcagacaagcccgtcagggcgcgtcagcgggtgttggcgggtgtcggggcgcagccatgacccagtcacgtagcgatagcggagtgtatactggcttaactatgcggcatcagagcagattgtactgagagtgcaccatatgcggtgtgaaataccgcacagatgcgtaaggagaaaataccgcatcaggcgctcttccgcttcctcgctcactgactcgctgcgctcggtcgttcggctgcggcgagcggtatcagctcactcaaaggcggtaatacggttatccacagaatcaggggataacgcaggaaagaacatgtgagcaaaaggccagcaaaaggccaggaaccgtaaaaaggccgcgttgctggcgtttttccataggctccgcccccctgacgagcatcacaaaaatcgacgctcaagtcagaggtggcgaaacccgacaggactataaagataccaggcgtttccccctggaagctccctcgtgcgctctcctgttccgaccctgccgcttaccggatacctgtccgcctttctcccttcgggaagcgtggcgctttctcaatgctcacgctgtaggtatctcagttcggtgtaggtcgttcgctccaagctgggctgtgtgcacgaaccccccgttcagcccgaccgctgcgccttatccggtaactatcgtcttgagtccaacccggtaagacacgacttatcgccactggcagcagccactggtaacaggattagcagagcgaggtatgtaggcggtgctacagagttcttgaagtggtggcctaactacggctacactagaaggacagtatttggtatctgcgctctgctgaagccagttaccttcggaaaaagagttggtagctcttgatccggcaaacaaaccaccgctggtagcggtggtttttttgtttgcaagcagcagattacgcgcagaaaaaaaggatctcaagaagatcctttgatcttttctacggggtctgacgctcagtggaacgaaaactcacgttaagggattttggtcatgagattatcaaaaaggatcttcacctagatccttttaaattaaaaatgaagttttaaatcaatctaaagtatatatgagtaaacttggtctgacagttaccaatgcttaatcagtgaggcacctatctcagcgatctgtctatttcgttcatccatagttgcctgactccccgtcgtgtagataactacgatacgggagggcttaccatctggccccagtgctgcaatgataccgcgagacccacgctcaccggctccagatttatcagcaataaaccagccagccggaagggccgagcgcagaagtggtcctgcaactttatccgcctccatccagtctattaattgttgccgggaagctagagtaagtagttcgccagttaatagtttgcgcaacgttgttgccattgctacagcatcgtggtgtcacgctcgtcgtttggtatggcttcattcagctccggttcccaacgatcaaggcgagttacatgatcccccatgttgtgcaaaaaagcggttagctccttcggtcctccgatcgttgtcagaagtaagttggccgcagtgttatcactcatggttatggcagcactgcataattctcttactgtcatgccatccgtaagatgcttttctgtgactggtgagtactcaaccaagtcattctgagaatagtgtatgcggcgaccgagttgctcttgcccggcgtcaacacgggataataccgcgccacatagcagaactttaaaagtgctcatcattggaaaacgttcttcggggcgaaaactctcaaggatcttaccgctgttgagatccagttcgatgtaacccactcgtgcacccaactgatcttcagcatcttttactttcaccagcgtttctgggtgagcaaaaacaggaaggcaaaatgccgcaaaaaagggaataagggcgacacggaaatgttgaatactcatactcttcctttttcaatattattgaagcatttatcagggttattgtctcatgagcggatacatatttgaatgtatttagaaaaataaacaaaagagtttgtagaaacgcaaaaaggccatccgtcaggatggccttctgcttaatttgatgcctggcagtttatggcgggcgtcctgcccgccaccctccgggccgttgcttcgcaacgttcaaatccgctcccggcggatttgtcctactcaggagagcgttcaccgacaaacaacagataaaacgaaaggcccagtctttcgactgagcctttcgttttatttgatgcctggcagttccctactctcgcatggggagaccccacactaccatcggcgctacggcgtttcacttctgagttcggcatggggtcaggtgggaccaccgcgctactgccgccaggcaaattctgttttatcagaccgcttctgcgttctgatttaatctgtatcaggctgaaaatcttctctcatccgccaaaacagccaagcttctattaaccgaacgcttcgtccaagatttcttgctgctccacggcatgaaccttcgaggaaccgctgctcggcgcagacatcgcgcgacgggagatacgcttgatgcccgccaacttgtccggcagcaactccggcaactccaaaccgaaacgcggccaggcgccctggttcgctggttcctcctggacccaaaagaactctttgacattttcgtaacgatccagggtttcacgcagacgacgacgcggcaacggcgccagttgctccagacgcacaattgccagatcattacggttgtctttcgccttgcgtgccgccaattcataatacaacttaccggaggtcaacagaatacggctaactttattgcggtcgccgataccatcctcgtaggtcggttcctccaggacgctacggaatttaatctcggtaaaatccttaatctccgaaaccgccgccttgtggcgcagcatggatttcggggtaaacacgatcaacggacgttggatgccgtccaacgcgtggcggcgcagcaagtgaaagtaattggacggggtgctcggcatcgcgatcgtcatgctaccctcagcccacagctgcaaaaagcgctcaatgcgcgccgacgtgtggtccgggccctgaccctcgtggccgtgtggcagcaacagaacaacgttggacagctgaccccatttcgcttcgcccgagctgatgaactcgtcaatgatcgactgggcaccattaacaaagtcgccgaattgcgcctcccacagcacaaccgcgtctggattgccaacggtataaccgtactcaaaacccacagccgcgtattccgacaacggcgaatcataaaccaggaacttaccaccggtcgggctgccgtcgctgttagtcgccagcagctgcagcggggtgaactcctcgccggtgtgacggtcgatcagcacagaatgacgctggctaaaggtgccacgacgagagtcttgaccgctcagacggaccagcttgccctcagcaaccaggctgcccagcgccagcaactcaccaaacgcccagtcaatcttaccctcatacgccatctcacgacgcttttccagcaccggctgaacgcgcgggtgtgccgtgaaaccgttaggcagcgccaggaaggcatcaccgatacgtgccagcagggatttgtcaacagcggtcgccaggcccgctgggatcatttggtccgactcgacgctctccgacggttggacgccgtgcttctccagttcgcgcacttcgttgaacacacgctccagttggccctggtaatcgcgcagcgcatcctccgcctctttcatgctgatgtcgccacgaccgatcagagcctcggtgtaggatttacgggcgccacgcttggtgtccacgacgtcatagacatacggattggtcatagatggatcgtcaccctcattatgaccacgacgacgatagcacagcatgtcaataacaacgtcctttttaaagcgttggcggaagtcaactgccaaacgcgcaacccagacacacgcttctggatcgtcgccgttcacgtggaagattggcgcaccgatcatcttcgccacatccgtgcagtactcgctcgaacgagagtattccggagcggtggtgaagccgatttggttgttcacaatgatgtgaatcgtaccacccacacgatagccaggcagatttgccagattcagcgtctccgcaacaacgccttgacccgcgaaggccgcatcaccgtgcagcatcaacggaacgacggagaatgcacgttggccgtcggagtcaatggaaccgtggtccagcaggtcttgcttcgcacgcaccaaaccttccagcactggatcgaccgcttccaaatgggacggatttgccgtcagggaaacctgaatatcgttatcgccaaacatttgcagatacagacccgtcgcacccaggtggtacttgacatcgccggaaccgtgagcctgggacgggttcagattgccttcaaactccgtaaagatttgcgaatacggtttgcccacgatgttcgccaggacattcaagcgaccacggtgcggcatgccaatgaccacttcatccaaaccatgctcggcacattggtcaatcgccgcgtccatcattggaataacagattccgcaccctccaggctaaaacgcttttggcccacatacttggtttgcaggaaggtttcaaacgcctccgctgcgttcagtttcgacaagatgtacttttgttgagcaacggtcggtttgacgtgcttcgtctcgacacgctgctccagccactccttttgttccgggtccagaatgtgcgcgtactcaacaccgatgtgacggcagtacgcgtcgcgcagcaaacccagcacgtcacgcagctttttgtattgagcacccgcgaaaccgtcaaccttaaagacgcggtccaggtcccacagagtcaggccatgcgtcaacacctccaaatccggatgcgaacgaaagcgcgccttatccaagcgcaacgggtcggtgtccgccatcagatggccgcggttgcgataggccgcgatcaggttcatcacacgtgcgttcttgtcaacgatcgagtccggattatcggtgctccaacgcactggcaggtacgggatgctcagctcgcggaagacctcatcccagaagccatcagacaacagcagttcatgaatggtacgcaggaagtcaccgctttccgcaccttgaatgatacggtggtcgtaggtagaagtcagggtaatcagtttgccaatacccagctcagcgatgcgttcctcggacgcgccttggaactccgccggatattccatcgcaccgacaccgatgatagcaccttgacctggcatcaggcgtggcacagagtgcaccgtgccaatcgtgcccggattcgtcagcgaaatcgtaacgccagcgaagtcctcggtggtcagtttaccatcacgagcacgacggacgatgtcctcgtacgcggtaacgaactgcgcgaagcgcatcgtctcgcaacgtttgataccggccaccaccagagagcgcttgccatctttaccttgcaggtcaatagccagacccagattggtgtgcgcaggagtaaccgccgtcggcttaccgtccacctccgtgtagtggcgattcatattcgggaacttcttaaccgcctgaaccagagcataacccagcaaatgggtaaagctgattttaccaccacgcgtgcgtttcaactgattattgatcacgatacgattatcgatcaacaatttcgctggcacagcacgcaccgaggtcgccgtaggcacttccagcgacgcgctcatgttcttcacgacagcagccgccgcaccacgcaggacagcaacttcatcgccttcggctggcggaggcaccgcggtcttggcggccagagccgccacgacaccgttgcccgctgcggccgtgtcggccggtttcggcggcgcttgcggagccgccgctgccgcacgctcagcgaccaaagggctggtcacacgagtcggctcagcagccggttgggaagtcggctccgggctatagtccaccagaaactcatgccagcttgggtcaacggaagacggatcatcacgaaatttacgatacataccaacacgagacgggtcctgagtcaccatggatatatctccttcttaaagaa

SEQ ID NO: 5 - DNA, 1833 bp, Artificial Sequence
  Description of Artificial Sequence: Synthetic polynucleotide
gacgaattctctagatatcgctcaatactgaccatttaaatcatacctgacctccatagcagaaagtcaaaagcctccgaccggaggcttttgacttgatcggcacgtaagaggttccaactttcaccataatgaaataagatcactaccgggcgtattttttgagttatcgagattttcaggagctaaggaagctaaaatgagtattcaacatttccgtgtcgcccttattcccttttttgcggcattttgccttcctgtttttgctcacccagaaacgctggtgaaagtaaaagatgctgaagatcagttgggtgcacgagtgggttacatcgaactggatctcaacagcggtaagatccttgagagtttacgccccgaagaacgttttccaatgatgagcacttttaaagttctgctatgtggcgcggtattatcccgtattgacgccgggcaagagcaactcggtcgccgcatacactattctcagaatgacttggttgagtactcaccagtcacagaaaagcatctcacggatggcatgacagtaagagaattatgcagtgctgccataaccatgagtgataacactgcggccaacttacttctggcaacgatcggaggaccgaaggagctaaccgcttttttgcacaacatgggggatcatgtaactcgccttgatcgttgggaaccggagctgaatgaagccataccaaacgacgagcgtgacaccacgatgcctgtagcaatggcaacaacgttgcgcaaactattaactggcgaactacttactctagcttcccggcaacaattaatagactggatggaggcggataaagttgcaggatcacttctgcgctcggccctcccggctggctggtttattgctgataaatctggagccggtgagcgtgggtctcgcggtatcattgcagcactggggccagatggtaagccctcccgcatcgtagttatctacacgacggggagtcaggcaactatggatgaacgaaatagacagatcgctgagataggtgcctcactgattaagcattggtaatgagggcccaaatgtaatcacctggctcaccttcgggtgggcctttctgcgttgctggcgtttttccataggctccgcccccctgacgagcatcacaaaaatcgatgctcaagtcagaggtggcgaaacccgacaggactataaagataccaggcgtttccccctggaagctccctcgtgcgctctcctgttccgaccctgccgcttaccggatacctgtccgcctttctcccttcgggaagcgtggcgctttctcatagctcacgctgtaggtatctcagttcggtgtaggtcgttcgctccaagctgggctgtgtgcacgaaccccccgttcagcccgaccgctgcgccttatccggtaactatcgtcttgagtccaacccggtaagacacgacttatcgccactggcagcagccactggtaacaggattagcagagcgaggtatgtaggcggtgctacagagttcttgaagtggtggcctaactacggctacactagaagaacagtatttggtatctgcgctctgctgaagccagttacctcggaaaaagagttggtagctcttgatccggcaaacaaaccaccgctggtagcggtggtttttttgtttgcaagcagcagattacgcgcagaaaaaaaggatctcaagaagatcctttgattttctaccgaagaaaggcccacccgtgaaggtgagccagtgagttgattgcagtccagttacgctggagtctgaggctcgtcctgaatgatatcaagcttgaattcgtt

SEQ ID NO: 6 - DNA, 1980 bp, Artificial Sequence
  Description of Artificial Sequence: Synthetic polynucleotide
gacgaattctctagatatcgctcaatactgaccatttaaatcatacctgacctccatagcagaaagtcaaaagcctccgaccggaggcttttgacttgatcggcacgtaagaggttccaactttcaccataatgaaataagatcactaccgggcgtattttttgagttatcgagattttcaggagctaaggaagctaaaatgagccatattcaacgggaaacgtcttgctcgaggccgcgattaaattccaacatggatgctgatttatatgggtataaatgggctcgcgataatgtcgggcaatcaggtgcgacaatctatcgattgtatgggaagcccgatgcgccagagttgtttctgaaacatggcaaaggtagcgttgccaatgatgttacagatgagatggtcaggctaaactggctgacggaatttatgcctcttccgaccatcaagcattttatccgtactcctgatgatgcatggttactcaccactgcgatcccagggaaaacagcattccaggtattagaagaatatcctgattcaggtgaaaatattgttgatgcgctggcagtgttcctgcgccggttgcattcgattcctgtttgtaattgtccttttaacggcgatcgcgtatttcgtctcgctcaggcgcaatcacgaatgaataacggtttggttggtgcgagtgattttgatgacgagcgtaatggctggcctgttgaacaagtctggaaagaaatgcataagcttttgccattctcaccggattcagtcgtcactcatggtgatttctcacttgataaccttatttttgacgaggggaaattaataggttgtattgatgttggacgagtcggaatcgcagaccgataccaggatcttgccatcctatggaactgcctcggtgagttttctccttcattacagaaacggctttttcaaaaatatggtattgataatcctgatatgaataaattgcagtttcacttgatgctcgatgagtttttctaaatgaccaaacaggaaaaaaccgcccttaacatggcccgctttatcagaagccagacattaacgcttctggagaaactcaacgagctggacgcggatgaacaggcagacatctgtgaatcgcttcacgaccacgctgatgagctttaccgcagctgcctcgcgcgtttcggtgatgacggtgaaaacctctgatgagggcccaaatgtaatcacctggctcaccttcgggtgggcctttctgcgttgctggcgtttttccataggctccgcccccctgacgagcatcacaaaaatcgatgctcaagtcagaggtggcgaaacccgacaggactataaagataccaggcgtttccccctggaagctccctcgtgcgctctcctgttccgaccctgccgcttaccggatacctgtccgcctttctcccttcgggaagcgtggcgctttctcatagctcacgctgtaggtatctcagttcggtgtaggtcgttcgctccaagctgggctgtgtgcacgaaccccccgttcagcccgaccgctgcgccttatccggtaactatcgtcttgagtccaacccggtaagacacgacttatcgccactggcagcagccactggtaacaggattagcagagcgaggtatgtaggcggtgctacagagttcttgaagtggtggcctaactacggctacactagaagaacagtatttggtatctgcgctctgctgaagccagttacctcggaaaaagagttggtagctcttgatccggcaaacaaaccaccgctggtagcggtggtttttttgtttgcaagcagcagattacgcgcagaaaaaaaggatctcaagaagatcctttgattttctaccgaagaaaggcccacccgtgaaggtgagccagtgagttgattgcagtccagttacgctggagtctgaggctcgtcctgaatgatatcaagcttgaattcgtt

SEQ ID NO: 7 - DNA, 2404 bp, Artificial Sequence
  Description of Artificial Sequence: Synthetic polynucleotide
aacgaattcaagcttgatatcattcaggacgagcctcagactccagcgtaactggactgaaaacaaactaaagcgcccttgtggcgctttagttttgttccgcggccaccggctggctcgcttcgctcggcccgtggacaaccctgctggacaagctgatggacaggctgcgcctgcccacgagcttgaccacagggattgcccaccggctacccagccttcgaccacatacccaccggctccaactgcgcggcctgcggccttgccccatcaatttttttaattttctctggggaaaagcctccggcctgcggcctgcgcgcttcgcttgccggttggacaccaagtggaaggcgggtcaaggctcgcgcagcgaccgcgcagcggcttggccttgacgcgcctggaacgacccaagcctatgcgagtgggggcagtcgaaggcgaagcccgcccgcctgccccccgagcctcacggcggcgagtgcgggggttccaagggggcagcgccaccttgggcaaggccgaaggccgcgcagtcgatcaacaagccccggaggggccactttttgccggagggggagccgcgccgaaggcgtgggggaaccccgcaggggtgcccttctttgggcaccaaagaactagatatagggcgaaatgcgaaagacttaaaaatcaacaacttaaaaaaggggggtacgcaacagctcattgcggcaccccccgcaatagctcattgcgtaggttaaagaaaatctgtaattgactgccacttttacgcaacgcataattgttgtcgcgctgccgaaaagttgcagctgattgcgcatggtgccgcaaccgtgcggcaccctaccgcatggagataagcatggccacgcagtccagagaaatcggcattcaagccaagaacaagcccggtcactgggtgcaaacggaacgcaaagcgcatgaggcgtgggccgggcttattgcgaggaaacccacggcggcaatgctgctgcatcacctcgtggcgcagatgggccaccagaacgccgtggtggtcagccagaagacactttccaagctcatcggacgttctttgcggacggtccaatacgcagtcaaggacttggtggccgagcgctggatctccgtcgtgaagctcaacggccccggcaccgtgtcggcctacgtggtcaatgaccgcgtggcgtggggccagccccgcgaccagttgcgcctgtcggtgttcagtgccgccgtggtggttgatcacgacgaccaggacgaatcgctgttggggcatggcgacctgcgccgcatcccgaccctgtatccgggcgagcagcaactaccgaccggccccggcgaggagccgcccagccagcccggcattccgggcatggaaccagacctgccagccttgaccgaaacggaggaatgggaacggcgcgggcagcagcgcctgccgatgcccgatgagccgtgttttctggacgatggcgagccgttggagccgccgacacgggtcacgctgccgcgccggtagtacgtaagaggttccaactttcaccataatgaaataagatcactaccgggcgtattttttgagttatcgagattttcaggagctaaggaagctaaaatggagaaaaaaatcactggatataccaccgttgatatatcccaatggcatcgtaaagaacattttgaggcatttcagtcagttgctcaatgtacctataaccagaccgttcagctggatattacggcctttttaaagaccgtaaagaaaaataagcacaagttttatccggcctttattcacattcttgcccgcctgatgaatgctcatccggaattccgtatggcaatgaaagacggtgagctggtgatatgggatagtgttcacccttgttacaccgttttccatgagcaaactgaaacgttttcatcgctctggagtgaataccacgacgatttccggcagtttctacacatatattcgcaagatgtggcgtgttacggtgaaaacctggcctatttccctaaagggtttattgagaatatgtttttcgtctcagccaatccctgggtgagtttcaccagttttgatttaaacgtggccaatatggacaacttcttcgcccccgttttcaccatgggcaaatattatacgcaaggcgacaaggtgctgatgccgctggcgattcaggttcatcatgccgtttgtgatggcttccatgtcggcagaatgcttaatgaattacaacagtactgcgatgagtggcagggcggggcgtaaacgcgtggatccccctcaagtcaaaagcctccggtcggaggcttttgactttctgctatggaggtcaggtatgatttaaatggtcagtattgagcgatatctagagaattcgtc

SEQ ID NO: 8 - DNA, 1884 bp, Artificial Sequence
  Description of Artificial Sequence: Synthetic polynucleotide
gccttatccggtaactatcgtcttgagtccaacccggtaagacacgacttatcgccactggcagcagccactggtaacaggattagcagagcgaggtatgtaggcggtgctacagagttcttgaagtggtggcctaactacggctacactagaaggacagtatttggtatctgcgctctgctgaagccagttaccttcggaaaaagagttggtagctcttgatccggcaaacaaaccaccgctggtagcggtggtttttttgtttgcaagcagcagattacgcgcagaaaaaaaggatctcaagaagatcctttgatcttttctacggggtctgacgctcagtggaacgaaaactcacgttaagggattttggtcatgagattatcaaaaaggatcttcacctagatccttttaaattaaaaatgaagttttaaatcaatctaaagtatatatgagtaaacttggtctgacagttaccaatgcttaatcagtgaggcacctatctcagcgatctgtctatttcgttcatccatagttgcctgactccccgtcgtgtagataactacgatacgggagggcttaccatctggccccagtgctgcaatgataccgcgagacccacgctcaccggctccagatttatcagcaataaaccagccagccggaagggccgagcgcagaagtggtcctgcaactttatccgcctccatccagtctattaattgttgccgggaagctagagtaagtagttcgccagttaatagtttgcgcaacgttgttgccattgctacagcatcgtggtgtcacgctcgtcgtttggtatggcttcattcagctccggttcccaacgatcaaggcgagttacatgatcccccatgttgtgcaaaaaagcggttagctccttcggtcctccgatcgttgtcagaagtaagttggccgcagtgttatcactcatggttatggcagcactgcataattctcttactgtcatgccatccgtaagatgcttttctgtgactggtgagtactcaaccaagtcattctgagaatagtgtatgcggcgaccgagttgctcttgcccggcgtcaacacgggataataccgcgccacatagcagaactttaaaagtgctcatcattggaaaacgttcttcggggcgaaaactctcaaggatcttaccgctgttgagatccagttcgatgtaacccactcgtgcacccaactgatcttcagcatcttttactttcaccagcgtttctgggtgagcaaaaacaggaaggcaaaatgccgcaaaaaagggaataagggcgacacggaaatgttgaatactcatactcttcctttttcaatattattgaagcatttatcagggttattgtctcatgagcggatacatatttgaatgtatttagaaaaataaacaaaagagtttgtagaaacgcaaaaaggccatccgtcaggatggccttctgcttaatttgatgcctggcagtttatggcgggcgtcctgcccgccaccctccgggccgttgcttcgcaacgttcaaatccgctcccggcggatttgtcctactcaggagagcgttcaccgacaaacaacagataaaacgaaaggcccagtctttcgactgagcctttcgttttatttgatgcctggcagttccctactctcgcatggggagaccccacactaccatcggcgctacggcgtttcacttctgagttcggcatggggtcaggtgggaccaccgcgctactgccgccaggcaaattctgttttatcagaccgcttctgcgttctgatttaatctgtatcaggctgaaaatcttctctcatccgccaaaacagccaagcttggctgcaggtcgacggatccccgggaa

SEQ ID NO: 9 - DNA, 2350 bp, Artificial Sequence
  Description of Artificial Sequence: Synthetic polynucleotide
cgcggtatcattgcagcactggggccagatggtaagccctcccgtatcgtagttatctacacgacggggagtcaggcaactatggatgaacgaaatagacagatcgctgagataggtgcctcactgattaagcattggtaactgtcagaccaagtttactcatatatactttagattgatttaaaacttcatttttaatttaaaaggatctaggtgaagatcctttttgataatctcatgaccaaaatcccttaacgtgagttttcgttccactgagcgtcagaccccttaataagatgatcttcttgagatcgttttggtctgcgcgtaatctcttgctctgaaaacgaaaaaaccgccttgcagggcggtttttcgaaggttctctgagctaccaactctttgaaccgaggtaactggcttggaggagcgcagtcaccaaaacttgtcctttcagtttagccttaaccggcgcatgacttcaagactaactcctctaaatcaattaccagtggctgctgccagtggtgcttttgcatgtctttccgggttggactcaagacgatagttaccggataaggcgcagcggtcggactgaacggggggttcgtgcatacagtccagcttggagcgaactgcctacccggaactgagtgtcaggcgtggaatgagacaaacgcggccataacagcggaatgacaccggtaaaccgaaaggcaggaacaggagagcgcacgagggagccgccagggggaaacgcctggtatctttatagtcctgtcgggtttcgccaccactgatttgagcgtcagatttcgtgatgcttgtcaggggggcggagcctatggaaaaacggctttgccgcggccctctcacttccctgttaagtatcttcctggcatcttccaggaaatctccgccccgttcgtaagccatttccgctcgccgcagtcgaacgaccgagcgtagcgagtcagtgagcgaggaagcggaatatatcctgtatcacatattctgctgacgcaccggtgcagccttttttctcctgccacatgaagcacttcactgacaccctcatcagtgccaacatagtaagccagtatacactccgctagcgctgaggtctgcctcgtgaagaaggtgttgctgactcataccaggcctgaatcgccccatcatccagccagaaagtgagggagccacggttgatgagagctttgttgtaggtggaccagttggtgattttgaacttttgctttgccacggaacggtctgcgttgtcgggaagatgcgtgatctgatccttcaactcagcaaaagttcgatttattcaacaaagccacgttgtgtctcaaaatctctgatgttacattgcacaagataaaaatatatcatcatgaacaataaaactgtctgcttacataaacagtaatacaaggggtgttatgagccatattcaacgggaaacgtcttgctcgaggccgcgattaaattccaacatggatgctgatttatatgggtataaatgggctcgcgataatgtcgggcaatcaggtgcgacaatctatcgattgtatgggaagcccgatgcgccagagttgtttctgaaacatggcaaaggtagcgttgccaatgatgttacagatgagatggtcagactaaactggctgacggaatttatgcctcttccgaccatcaagcattttatccgtactcctgatgatgcatggttactcaccactgcgatccccgggaaaacagcattccaggtattagaagaatatcctgattcaggtgaaaatattgttgatgcgctggcagtgttcctgcgccggttgcattcgattcctgtttgtaattgtccttttaacagcgatcgcgtatttcgtctcgctcaggcgcaatcacgaatgaataacggtttggttgatgcgagtgattttgatgacgagcgtaatggctggcctgttgaacaagtctggaaagaaatgcataagcttttgccattctcaccggattcagtcgtcactcatggtgatttctcacttgataaccttatttttgacgaggggaaattaataggttgtattgatgttggacgagtcggaatcgcagaccgataccaggatcttgccatcctatggaactgcctcggtgagttttctccttcattacagaaacggctttttcaaaaatatggtattgataatcctgatatgaataaattgcagtttcatttgatgctcgatgagtttttctaatcagaattggttaattggttgtaacactggcagagcattacgctgacttgacgcggaagagccgatgcttgacgcggaagagccgatgc

SEQ ID NO: 10 - DNA, 7929 bp, Artificial Sequence
  Description of Artificial Sequence: Synthetic polynucleotide
aatgacaaatggtccaaactagtactaataaaattaatcattttgaaagcgcaaacaaagttttatacgaaggtaaagattctaaaaatcctttagcttttaaatactataaccctgaagaagtagtaggcggtaaaacgatgaaagatcagctgcgtttttctgttgcttactggcaccagtttacagcagatggtacggatcaattcgagctcggtacccggggatcctctagagtcgacctgcaggcatgcaagctttcgcgagctcgagatctagatatcgatgaattgatccgacgcgaggctggatggccttccccattatgattcttctcgcttccggcggcatcgggatgcccgcgttgcaggccatgctgtccaggcaggtagatgacgaccatcagggacagcttcaaggatcgctcgcggctcttaccagcctaacttcgatcactggaccgctgatcgtcacggcgatttatgccgcctcggcgagcacatggaacgggttggcatggattgtaggcgccgccctataccttgtctgcctccccgcgttgcgtcgcggtgcatggagccgggccacctcgacctgaatggaagccggcggcacctcgctaacggattcaccactccaagaattggagccaatcaattcttgcggagaactgtgaatgcgcaaaccaacccttggcagaacatatccatcgcgtccgccatctccagcagccgcacgcggcgcatctcgggccgcgttgctggcgtttttccataggctccgcccccctgacgagcatcacaaaaatcgacgctcaagtcagaggtggcgaaacccgacaggactataaagataccaggcgtttccccctggaagctccctcgtgcgctctcctgttccgaccctgccgcttaccggatacctgtccgcctttctcccttcgggaagcgtggcgctttctcaatgctcacgctgtaggtatctcagttcggtgtaggtcgttcgctccaagctgggctgtgtgcacgaaccccccgttcagcccgaccgctgcgccttatccggtaactatcgtcttgagtccaacccggtaagacacgacttatcgccactggcagcagccactggtaacaggattagcagagcgaggtatgtaggcggtgctacagagttcttgaagtggtggcctaactacggctacactagaaggacagtatttggtatctgcgctctgctgaagccagttaccttcggaaaaagagttggtagctcttgatccggcaaacaaaccaccgctggtagcggtggtttttttgtttgcaagcagcagattacgcgcagaaaaaaaggatctcaagaagatcctttgatcttttctacggggtctgacgctcagtggaacgaaaactcacgttaagggattttggtcatgagattatcaaaaaggatcttcacctagatccttttaaattaaaaatgaagttttaaatcaatctaaagtatatatgagtaaacttggtctgacagttaccaatgcttaatcagtgaggcacctatctcagcgatctgtctatttcgttcatccatagttgcctgactccccgtcgtgtagataactacgatacgggagggcttaccatctggccccagtgctgcaatgataccgcgagacccacgctcaccggctccagatttatcagcaataaaccagccagccggaagggccgagcgcagaagtggtcctgcaactttatccgcctccatccagtctattaattgttgccgggaagctagagtaagtagttcgccagttaatagtttgcgcaacgttgttgccattgctgcaggcatcgtggtgtcacgctcgtcgtttggtatggcttcattcagctccggttcccaacgatcaaggcgagttacatgatcccccatgttgtgcaaaaaagcggttagctccttcggtcctccgatcgttgtcagaagtaagttggccgcagtgttatcactcatggttatggcagcactgcataattctcttactgtcatgccatccgtaagatgcttttctgtgactggtgagtactcaaccaagtcattctgagaatagtgtatgcggcgaccgagttgctcttgcccggcgtcaacacgggataataccgcgccacatagcagaactttaaaagtgctcatcattggaaaacgttcttcggggcgaaaactctcaaggatcttaccgctgttgagatccagttcgatgtaacccactcgtgcacccaactgatcttcagcatcttttactttcaccagcgtttctgggtgagcaaaaacaggaaggcaaaatgccgcaaaaaagggaataagggcgacacggaaatgttgaatactcatactcttcctttttcaatattattgaagcatttatcagggttattgtctcatgagcggatacatatttgaatgtatttagaaaaataaacaaataggggttccgcgcacatttccccgaaaagtgccacctgacgtctaagaaaccattattatcatgacattaacctataaaaataggcgtatcacgaggccctttcgtcttcaagaattcctgttataaaaaaaggatcaattttgaactctctcccaaagttgatcccttaacgatttagaaatccctttgagaatgtttatatacattcaaggtaaccagccaactaatgacaatgattcctgaaaaaagtaataacaaattactatacagataagttgactgatcaacttccataggtaacaacctttgatcaagtaagggtatggataataaaccacctacaattgcaatacctgttccctctgataaaaagctggtaaagttaagcaaactcattccagcaccagcttcctgctgtttcaagctacttgaaacaattgttgatataactgttttggtgaacgaaagcccacctaaaacaaatacgattataattgtcatgaaccatgatgttgtttctaaaagaaaggaagcagttaaaaagctaacagaaagaaatgtaactccgatgtttaacacgtataaaggacctcttctatcaacaagtatcccaccaatgtagccgaaaataatgacactcattgttccagggaaaataattacacttccgatttcggcagtacttagctggtgaacatctttcatcatataaggaaccatagagacaaaccctgctactgttccaaatataattcccccacaaagaactccaatcataaaaggtatatttttccctaatccgggatcaacaaaaggatctgttactttcctgatatgttttacaaatatcaggaatgacagcacgctaacgataagaaaagaaatgctatatgatgttgtaaacaacataaaaaatacaatgcctacagacattagtataattcctttgatatcaaaatgaccttttatccttacttctttctttaataatttcataagaaacggaacagtgataattgttatcataggaatgagtagaagataggaccaatgaatataatgggctatcattccaccaatcgctggaccgactccttctcccatggctactatcgatccaataagaccaaatgctttacccctattttcctttggaatatagcgcgcaactacaaccattacgagtgctggaaatgcagctgcaccagccccttgaataaaacgagccataataagtaaggaaaagaaagaatggccaacaaacccaattaccgacccgaaacaatttattataattccaaataggagtaaccttttgatgcctaattgatcagatagctttccatatacagctgttccaatggaaaaggttaacataaaggctgtgttcacccagtttgtactcgcaggtggtttattaaaatcatttgcaatatcaggtaatgagacgttcaaaaccatttcatttaatacgctaaaaaaagataaaatgcaaagccaaattaaaatttggttgtgtcgtaaattcgattgtgaataggatgtattcacatttcaccctccaataatgagggcagacgtagtttatagggttaatgatacgcttccctcttttaattgaaccctgttacattcattacacttcataattaattcctcctaaacttgattaaaacattttaccacatataaactaagttttaaattcagtatttcatcacttatacaacaatatggcccgtttgttgaactactctttaataaaataatttttccgttcccaattccacattgcaataatagaaaatccatcttcatcggctttttcgtcatcatctgtatgaatcaaatcgccttcttctgtgtcatcaaggtttaattttttatgtatttcttttaacaaaccaccataggagattaaccttttacggtgtaaaccttcctccaaatcagacaaacgtttcaaattcttttcttcatcatcggtcataaaatccgtatcctttacaggatattttgcagtttcgtcaattgccgattgtatatccgatttatatttatttttcggtcgaatcatttgaacttttacatttggatcatagtctaatttcattgcctttttccaaaattgaatccattgtttttgattcacgtagttttctgtattcttaaaataagttggttccacacataccaatacatgcatgtgctgattataagaattatctttattatttattgtcacttccgttgcacgcataaaaccaacaagatttttattaatttttttatattgcatcattcggcgaaatccttgagccatatctgacaaactcttatttaattcttcgccatcataaacatttttaactgttaatgtgagaaacaaccaacgaactgttggcttttgtttaataacttcagcaacaaccttttgtgactgaatgccatgtttcattgctctcctccagttgcacattggacaaagcctggatttacaaaaccacactcgatacaactttctttcgcctgtttcacgattttgtttatactctaatatttcagcacaatcttttactctttcagcctttttaaattcaagaatatgcagaagttcaaagtaatcaacattagcgattttcttttctctccatggtctcacttttccactttttgtcttgtccactaaaacccttgatttttcatctgaataaatgctactattaggacacataatattaaaagaaacccccatctatttagttatttgtttggtcacttataactttaacagatggggtttttctgtgcaaccaattttaagggttttcaatactttaaaacacatacataccaacacttcaacgcacctttcagcaactaaaataaaaatgacgttatttctatatgtatcaagataagaaagaacaagttcaaaaccatcaaaaaaagacaccttttcaggtgctttttttattttataaactcattccctgatctcgacttcgttctttttttacctctcggttatgagttagttcaaattcgttctttttaggttctaaatcgtgtttttcttggaattgtgctgttttatcctttaccttgtctacaaaccccttaaaaacgtttttaaaggcttttaagccgtctgtacgttccttaaggaattctcatgtttgacagcttatcatcgataagctttaatgcggtagtttatcacagttaaattgctaacgcagtcaggcaccgtgtatgaaatctaacaatgcgctcatcgtcatcctcggcaccgtcaccctggatgctgtaggcataggcttggttatgccggtactgccgggcctcttgcgggatatcgtccattccgacagcatcgccagtcactatggcgtgctgctagcgctatatgcgttgatgcaatttctatgcgcacccgttctcggagcactgtccgaccgctttggccgccgcccagtcctgctcgcttcgctacttggagccactatcgactacgcgatcatggcgaccacacccgtcctgtggatctgacgcgtgtaactgcgaaggtaaaacgggtgattgaaaataaactaacaaatgaagaggaacgaaagagaagtctagaatttgttacgtttatatcggatgaattactgcaaaatgatacggagcctcgcacatttattattcagaactctcttttatcgctagagaaaatccatactctcgcacagaccaaagaggtagaggaatataaagaagtcataactactctgacaagacatgattcataatttgaaaagcaggtaaactaacccaaaaggcaagactctccgtagtttagaaaagagcaggttgctaataacatataaacagccagttgccgttatgataggtgactggctgcatgggatgaaaaggtgagggtggagacagacataacactcttaatagaagagggtaattctttctcttttatagaaaatcaattaattgaaagtagctccttcattcttaagatcaacgtgatataggtttgctaacctttgcgttcacttaactaacttataggggtaacacttaaaaaagaatcaataacgatagaaaccgctcctaaagcaggtgcattttttcctaacgaagaaggcaatagttcacatttattgtctaaatgagaatggactctagaagaaacttcgtttttaatcgtatttaaaacaatgggatgagattcaattatatgatttctcaagataacagcttctatatcaaatgtattaaggatattggttaatccaattccgatataaaagccaaagttttgaagtgcatttaacatttctacatcatttttatttgcgcgttccacaatctcttttcgagaaatattcttttcttctttagagagcgaagccagtaacgctttttcagaagcatataattcccaacagcctcgatttccacagctgcatttgggtccattaaaatctatcgtcatatgacccatttccccagaaaaaccctgaacacctttatacaattcgttgttaataacaagtccagttccaattccgatattaatactgatgtaaacgatgttttcatagttttttgtcataccaaatactttttcaccgtatgctcctgcattagcttcattttcaacaaaaaccggaacattaaactcactctcaattaaaaactgcaaatctttgatattccaatttaagttaggcatgaaaataatttgctgatgacgatctacaaggcctggaacacaaattcctattccgactagaccataaggggactcaggcatatgggttacaaaaccatgaataagtgcaaataaaatctcttttacttcactagcggaagaactagacaagtcagaagtcttctcgagaataatatttccttctaagtcggttagaattccgttaagatagtcgactcctatatcaataccaatcgagtagcctgcattcttattaaaaacaagcattacaggtcttctgccgcctctagattgccctgccccaatttcaaaaataaaatctttttcaagcagtgtatttacttgagaggagacagtagacttgtttaatcctgtaatctcagagagagttgccctggagacaggggagttcttcaaaatttcatctaatattaatttttgattcattttttttactaaagcttgatctgcaatttgaataataaccactcctttgtttatccaccgaactaagttggtgttttttgaagcttgaattagatatttaaaagtatcatatctaatattataactaaattttctaaaaaaaacattgaaataaacatttattttgtatatgatgagataaagttagtttattggataaacaaactaactcaattaagatagttgatggataaacttgttcacttaaatcaaaggggga

SEQ ID NO: 11 - DNA, 7988 bp, Artificial Sequence
  Description of Artificial Sequence: Synthetic polynucleotide
ctcgagggtaactagcctcgccgatcccgcaagaggcccggcagtcaggtggcacttttcggggaaatgtgcgcggaacccctatttgtttatttttctaaatacattcaaatatgtatccgctcatgagacaataaccctgataaatgcttcaataatattgaaaaaggaagagtatgagtattcaacatttccgtgtcgcccttattcccttttttgcggcattttgccttcctgtttttgctcacccagaaacgctggtgaaagtaaaagatgctgaagatcagttgggtgcacgagtgggttacatcgaactggatctcaacagcggtaagatccttgagagttttcgccccgaagaacgttttccaatgatgagcacttttaaagttctgctatgtggcgcggtattatcccgtattgacgccgggcaagagcaactcggtcgccgcatacactattctcagaatgacttggttgagtactcaccagtcacagaaaagcatcttacggatggcatgacagtaagagaattatgcagtgctgccataaccatgagtgataacactgcggccaacttacttctgacaacgatcggaggaccgaaggagctaaccgcttttttgcacaacatgggggatcatgtaactcgccttgatcgttgggaaccggagctgaatgaagccataccaaacgacgagcgtgacaccacgatgcctgtagcaatggcaacaacgttgcgcaaactattaactggcgaactacttactctagcttcccggcaacaattaatagactggatggaggcggataaagttgcaggaccacttctgcgctcggcccttccggctggctggtttattgctgataaatctggagccggtgagcgtgggtctcgcggtatcattgcagcactggggccagatggtaagccctcccgtatcgtagttatctacacgacggggagtcaggcaactatggatgaacgaaatagacagatcgctgagataggtgcctcactgattaagcattggtaactgtcagaccaagtttactcatatatactttagattgatttaaaacttcatttttaatttaaaaggatctaggtgaagatcctttttgataatctcatgaccaaaatcccttaacgtgagttttcgttccactgagcgtcagaccccgtagaaaagatcaaaggatcttcttgagatcctttttttctgcgcgtaatctgctgcttgcaaacaaaaaaaccaccgctaccagcggtggtttgtttgccggatcaagagctaccaactctttttccgaaggtaactggcttcagcagagcgcagataccaaatactgtccttctagtgtagccgtagttaggccaccacttcaagaactctgtagcaccgcctacatacctcgctctgctaatcctgttaccagtggctgctgccagtggcgataagtcgtgtcttaccgggttggactcaagacgatagttaccggataaggcgcagcggtcgggctgaacggggggttcgtgcacacagcccagcttggagcgaacgacctacaccgaactgagatacctacagcgtgagctatgagaaagcgccacgcttcccgaagggagaaaggcggacaggtatccggtaagcggcagggtcggaacaggagagcgcacgagggagcttccagggggaaacgcctggtatctttatagtcctgtcgggtttcgccacctctgacttgagcgtcgatttttgtgatgctcgtcaggggggcggagcctatggaaaaacgccagcaacgcggcctttttacggttcctggccttttgctggccttttgctcacatgttctttcctgcgttatcccctgattctgtggataaccgtattaccgcctttgagtgagctgataccgctcgccgcagccgaacgaccgagcgcagcgagtcagtgagcgaggaagcggaagagcgcccaatacgcatgcttaagttattggtatgactggttttaagcgcaaaaaaagttgctttttcgtacctattaatgtatcgttttagaaaaccgactgtaaaaagtacagtcggcattatctcatattataaaagccagtcattaggcctatctgacaattcctgaatagagttcataaacaatcctgcatgataaccatcacaaacagaatgatgtacctgtaaagatagcggtaaatatattgaattacctttattaatgaattttcctgctgtaataatgggtagaaggtaattactattattattgatatttaagttaaacccagtaaatgaagtccatggaataatagaaagagaaaaagcattttcaggtataggtgttttgggaaacaatttccccgaaccattatatttctctacatcagaaaggtataaatcataaaactctttgaagtcattctttacaggagtccaaataccagagaatgttttagatacaccatcaaaaattgtataaagtggctctaacttatcccaataacctaactctccgtcgctattgtaaccagttctaaaagctgtatttgagtttatcacccttgtcactaagaaaataaatgcagggtaaaatttatatccttcttgttttatgtttcggtataaaacactaatatcaatttctgtggttatactaaaagtcgtttgttggttcaaataatgattaaatatctcttttctcttccaattgtctaaatcaattttattaaagttcatttgatatgcctcctaaatttttatctaaagtgaatttaggaggcttacttgtctgctttcttcattagaatcaatccttttttaaaagtcaatattactgtaacataaatatatattttaaaaatatcccactttatccaattttcgtttgttgaactaatgggtgctttagttgaagaataaagaccacattaaaaaatgtggtcttttgtgtttttttaaaggatttgagcgtagcgaaaaatccttttctttcttatcttgataataagggtaactattgccgatcgtccattccgacagcatcgccagtcactatggcgtgctgctagcgccattcgccattcaggctgcgcaactgttgggaagggcgatcggtgcgggcctcttcgctattacgccagctggcgaaagggggatgtgctgcaaggcgattaagttgggtaacgccagggttttcccagtcacgacgttgtaaaacgacggccagtgaattcgagctcaggccttaactcacattaattgcgttgcgctcactgcccgctttccagtcgggaaacctgtcgtgccagctgcattaatgaatcggccaacgcgcggggagaggcggtttgcgtattgggcgccagggtggtttttcttttcaccagtgagacgggcaacagctgattgcccttcaccgcctggccctgagagagttgcagcaagcggtccacgctggtttgccccagcaggcgaaaatcctgtttgatggtggttgacggcgggatataacatgagctgtcttcggtatcgtcgtatcccactaccgagatatccgcaccaacgcgcagcccggactcggtaatggcgcgcattgcgcccagcgccatctgatcgttggcaaccagcatcgcagtgggaacgatgccctcattcagcatttgcatggtttgttgaaaaccggacatggcactccagtcgccttcccgttccgctatcggctgaatttgattgcgagtgagatatttatgccagccagccagacgcagacgcgccgagacagaacttaatgggcccgctaacagcgcgatttgctggtgacccaatgcgaccagatgctccacgcccagtcgcgtaccgtcttcatgggagaaaataatactgttgatgggtgtctggtcagagacatcaagaaataacgccggaacattagtgcaggcagcttccacagcaatggcatcctggtcatccagcggatagttaatgatcagcccactgacgcgttgcgcgagaagattgtgcaccgccgctttacaggcttcgacgccgcttcgttctaccatcgacaccaccacgctggcacccagttgatcggcgcgagatttaatcgccgcgacaatttgcgacggcgcgtgcagggccagactggaggtggcaacgccaatcagcaacgactgtttgcccgccagttgttgtgccacgcggttgggaatgtaattcagctccgccatcgccgcttccacttttcccgcgtttgcagaaacgtggctggcctggttcaccacgcgggaaacggtctgataagagacaccggcatactctgcgacatcgtataacgttactggtttcatcaaaatcgtctccctccgtttgaatatttgattgatcgtaaccagatgaagcactctttccactatccctacagtgttatggcttgaacaatcacgaaacaataattggtacgtacgatctttcagccgactcaaacatcaaatcttacaaatgtagtctttgaaagtattacatatgtaagatttaaatgcaaccgttttttcggaaggaaatgatgacctcgtttccaccggaattagcttggtaccagctattgtaacataatcggtacgggggtgaaaaagctaacggaaaagggagcggaaaagaatgatgtaagcgtgaaaaattttttatcttatcacttgaaattggaagggagattctttattataagaattgtggaattgtgagcggataacaattcccaattaaaggaggaaggatctatgcgcggaagccatcaccatcaccatcaccatcacggatcctctagagtcgacgtccccggggcagcccgcctaatgagcgggcttttttcacgtcacgcgtccatggagatctttgtctgcaactgaaaagtttataccttacctggaacaaatggttgaaacatacgaggctaatatcggcttattaggaatagtccctgtactaataaaatcaggtggatcagttgatcagtatattttggacgaagctcggaaagaatttggagatgacttgcttaattccacaattaaattaagggaaagaataaagcgatttgatgttcaaggaatcacggaagaagatactcatgataaagaagctctaaactattcataaccttacatggaattgatcgaagggtggaaggttaatggtacgaaattaggggatctacctagaaagcacaaggcgataggtcaagcttaaagaacccttacatggatcttacagattctgaaagtaaagaaacaacagaggttaaacaaacagaaccaaaaagaaaaaaagcattgttgaaaacaatgaaagttgatgtttcaatccataataagattaaatcgctgcacgaaattctggcagcatccgaagggaattcatattacttagaggatactattgagagagctattgataagatggttgagacattacctgagagccaaaaaactttttatgaatatgaattaaaaaaaagaaccaacaaaggctgagacagactccaaacgagtctgtttttttaaaaaaaatattaggagcattgaatatatattagagaattaagaaagacatgggaataaaaatattttaaatccagtaaaaatatgataagattatttcagaatatgaagaactctgtttgtttttgatgaaaaaacaaacaaaaaaaatccacctaacggaatctcaatttaactaacagcggccaaactgagaagttaaatttgagaaggggaaaaggcggatttatacttgtatttaactatctccattttaacattttattaaaccccatacaagtgaaaatcctcttttacactgttcctttaggtgatcgcggagggacattatgagtgaagtaaacctaaaaggaaatacagatgaattagtgtattatcgacagcaaaccactggaaataaaatcgccaggaagagaatcaaaaaagggaaagaagaagtttattatgttgctgaaacggaagagaagatatggacagaagagcaaataaaaaacttttctttagacaaatttggtacgcatataccttacatagaaggtcattatacaatcttaaataattacttctttgatttttggggctattttttaggtgctgaaggaattgcgctctatgctcacctaactcgttatgcatacggcagcaaagacttttgctttcctagtctacaaacaatcgctaaaaaaatggacaagactcctgttacagttagaggctacttgaaactgcttgaaaggtacggttttatttggaaggtaaacgtccgtaataaaaccaaggataacacagaggaatccccgatttttaagattagacgtaaggttcctttgctttcagaagaacttttaaatggaaaccctaatattgaaattccagatgacgaggaagcacatgtaaagaaggctttaaaaaaggaaaaagagggtcttccaaaggttttgaaaaaagagcacgatgaatttgttaaaaaaatgatggatgagtcagaaacaattaatattccagaggccttacaatatgacacaatgtatgaagatatactcagtaaaggagaaattcgaaaagaaatcaaaaaacaaatacctaatcctacaacatcttttgagagtatatcaatgacaactgaagaggaaaaagtcgacagtactttaaaaagcgaaatgcaaaatcgtgtctctaagccttcttttgatacctggtttaaaaacactaagatcaaaattgaaaataaaaattgtttattacttgtaccgagtgaatttgcatttgaatggattaagaaaagatatttagaaacaattaaaacagtccttgaagaagctggatatgttttcgaaaaaatcgaactaagaaaagtgcaataaactgctgaagtatttcagcagttttttttatttagaaatagtgaaaaaaatataatcagggaggtatcaatatttaatgagtactgatttaaatttatttagactggaattaataattaacacgtagactaattaaaatttaatgagggataaagaggatacaaaaatattaatttcaatccctattaaattttaacaagggggggattaaaatttaattagaggtttatccacaagaaaagaccctaataaaatttttactagggttataacactgattaatttcttaatgggggagggattaaaatttaatgacaaagaaaacaatcttttaagaaaagcttttaaaagataataataaaaagagctttgcgattaagcaaaactctttactttttcattgacattatcaaattcatcgatttcaaattgttgttgtatcataaagttaattctgttttgcacaaccttttcaggaatataaaacacatctgaggcttgttttataaactcagggtcgctaaagtcaatgtaacgtagcatatgatatggtatagcttccacccaagttagcctttctgcttcttctgaatgtttttcatatacttccatgggtatctctaaatgattttcctcatgtagcaaggtatgagcaaaaagtttatggaattgatagttcctctctttttcttcaacttttttatctaaaacaaacactttaacatctgagtcaatgtaagcataagatgtttttccagtcataatttcaatcccaaatcttttagacagaaattctggacgtaaatcttttggtgaaagaatttttttatgtagcaatatatccgatacagcaccttctaaaagcgttggtgaatagggcattttacctatctcctctcattttgtggaataaaaatagtcatattcgtccatctacctatcctattatcgaacagttgaactttttaatcaaggatcagtcctttttttcattattcttaaactgtgctcttaactttaacaactcgatttgtttttccagat

SEQ ID NO: 12 - DNA, 15537 bp, Artificial Sequence
  Description of Artificial Sequence: Synthetic polynucleotide
ttagtcgcactgcaaggggtgttatgagccatattcaggtataaatgggctcgcgataatgttcagaattggttaattggttgtaacactgacccctatttgtttatttttctaaatacattcaaatatgtatccgctcatgagacaataaccctgataaatgcttcaataatattgaaaaaggaagaatatgagccatattcaacgggaaacgtcgaggccgcgattaaattccaacatggatgctgatttatatgggtataaatgggctcgcgataatgtcgggcaatcaggtgcgacaatctatcgcttgtatgggaagcccgatgcgccagagttgtttctgaaacatggcaaaggtagcgttgccaatgatgttacagatgagatggtcagactaaactggctgacggaatttatgccacttccgaccatcaagcattttatccgtactcctgatgatgcatggttactcaccactgcgatccccggaaaaacagcgttccaggtattagaagaatatcctgattcaggtgaaaatattgttgatgcgctggcagtgttcctgcgccggttgcactcgattcctgtttgtaattgtccttttaacagcgatcgcgtatttcgcctcgctcaggcgcaatcacgaatgaataacggtttggttgatgcgagtgattttgatgacgagcgtaatggctggcctgttgaacaagtctggaaagaaatgcataaacttttgccattctcaccggattcagtcgtcactcatggtgatttctcacttgataaccttatttttgacgaggggaaattaataggttgtattgatgttggacgagtcggaatcgcagaccgataccaggatcttgccatcctatggaactgcctcggtgagttttctccttcattacagaaacggctttttcaaaaatatggtattgataatcctgatatgaataaattgcagtttcatttgatgctcgatgagtttttctaagcttaataagatgatcttcttgagatcgttttggtctgcgcgtaatctcttgctctgaaaacgaaaaaaccgccttgcagggcggtttttcgaaggttctctgagctaccaactctttgaaccgaggtaactggcttggaggagcgcagtcaccaaaacttgtcctttcagtttagccttaaccggcgcatgacttcaagactaactcctctaaatcaattaccagtggctgctgccagtggtgcttttgcatgtctttccgggttggactcaagacgatagttaccggataaggcgcagcggtcggactgaacggggggttcgtgcatacagtccagcttggagcgaactgcctacccggaactgagtgtcaggcgtggaatgagacaaacgcggccataacagcggaatgacaccggtaaaccgaaaggcaggaacaggagagcgcacgagggagccgccagggggaaacgcctggtatctttatagtcctgtcgggtttcgccaccactgatttgagcgtcagatttcgtgatgcttgtcaggggggcggagcctatggaaaaacggctttgccgcggccctctcacttccctgttaagtatcttcctggcatcttccaggaaatctccgccccgttcgtaagccatttccgctcgccgcagtcgaacgaccgagcgtagcgagtcagtgagcgaggaagcggaatatatcctgtatcacatattctgctgacgcaccggtgcagccttttttctcctgccacatgaagcacttcactgacaccctcatcagtgccaacatagtaagccagtatacactccgctagcgctgaggtcccgcagccgaacgaccgagcgcagcggcgagagtagggaactgccaggcatcttttagcgctgacagctgtctcttatacacatctataaaacgaaaggcccagtctttcgactgagcctttcgttttatttgatgcctggcagttccctactctcgcatggggagaccccacactaccatcggcgctacggcgtttcacttctgagttcggcatggggtcaggtgggaccaccgcgctactgccgccaggcaaatgagctcttaacctgccaggaagaaacggaaggccggattgttcgtctcgtcgtggcagtcataacccagctcattcagacgcgtctcaaaatccggctcgtgatcacccagttcgaacgccgccaggacacggccgtaatcggtgccatggctgcgatagtgaaacagggaaatgttccagtaggtacccagggtgttcaggaaacgcagcagcgcgcctggagactccgggaactcgaagctgtacaggcgctcctgcagcgggtggctcggacggccacccaccatgtaacgaacgtgcagctttgccatttcgtcatcgctcagatcgacaacagaataaccgccgtcattcagcatttgcaggatttctttacgttcttccagaccacggctcagacgcacgcccacgaagatgcatgcgtttttcgcgtctgcgaagcggtaattgaactcggtcacgctacgaccgcccagcaattggcaaaacttcagaaaagagcctttttcttccgggatagtaaccgccagcagtgcttcacgttgctcacccagctcgcaacgttcgctgacgtagcgcagaccgtggaaattcacattcgcaccgctcagaatgtgcgccagacgttcgccacggatgttgtgcagggcaatgtatttcttcatgcccgccagagccagggcaccgctcggctcagcgactgcgcggacatcttcgaacagatccttcattgcggcgcagatcgcatcgctatcgaccgtaatgatatcatccaagtattcctgacacaggcgaaacgtctcatcgccaatgcgtttaactgcaacgccttccgcaaacagaccaacacgcggcagatcgaccgggtggcctgcgtccagtgccgctttcagacatgcgctatcctccgcctcaactgcgatgaccttaatctgcggcatcaattgcttgatcagaacagcaacgcctgccgccaggccaccaccgccaaccggcacaaagacgcggtccagatgcgcgtcctgttgcagcagttccaaggccaacgtgccctgacccgcgatcaccatcggatgatcaaacggcgggacccaggtaaagccttgctgttggctcagttcgatcgctttcgctttagcttcatcgaagtttgcaccgtgcaacagaacttcgccaccaaaaccacgcactgcgtcaaccttaatgtcagcggttgccgtcggcatgacgatcagtgctttaacacccagacgcgcggacgagaaggcgacaccctgcgcgtggttacccgcgctggcggtaatgacgccgtgggctttctgctcttcggtcaaacctgccatcattgcatacgcaccacgcagtttgaagctgtggaccggctggcgatcctcgcgcttcaccaggatcacattatccagacggctgctcagcttttccatcttctgcagcggggtcacctgggctgcctcatacaccggcgcacgcagaaccgcacgcaggtattccgcgccttccggcgcaccgctcagcggctggctgtctgccatggaaatactccttgaaaagtaaagtgttagatgagtgcgttaattcacacttctgagaaatttcgctaaacgcatcaaaaaagcatagcagacaggcatggtattgctggattaagcaggtaacatcagtgttataggattattaccaaaacattatatgaattcgccggcttatgcggtcaccgaggccaaacgctcctgaacgatcgcgataaagtcgcgcaacgccggtttcattttaattctccacgcttataagcgaataaaggaagatggccgccccgcagggcagcaggtctgtgaaacagtatagagattcatcggcacaaaggctttgctttttgtcatttattcaaaccagtactgatatcttaaatgcccgcaccctgcgagaagtgttcttcaccaaacacgccagtgctcaaatagcgatcaccgcggtcacaaatgattgcgacgaccactgcatccggattcgccttggcgacgcgcagagcacccgcgactgcaccaccgctgctaacaccacagaagatgccttcgcggactgccagctcgcgcatggtgttttctgcatcgcgctgatggatgtccaacacctcatccaccaggctggcgttaaagatgcccggcagatactccgtaggccaacggcggatgcccggaatgctgctgccttcttccggctgcagacccacaatggtaaccggcttggattgttcgcgcatgaagcggctgacgccggtaatcgtgcccgtcgtgcccatgctcgaaacgaaatgggtaatacgaccaccggtctgttgccaaatctccggaccggtcgtggtatagtgcgcgtacggattgtcaggattgttgaactggtccaacagcttaccctcgccacgattcgccatttccagtgccaggtcacgcgcaccttccataccctgttctttggtaaccaagatcagttccgcaccataagcacgcatcgccgcacgacgttcttgagacatgttatctggcatcagcagtttcatacggtaacccttcagcgcggcaatcattgccagtgcgataccggtgttaccgctggtcgcttcaatcagaacgtcacccggcttgatctcaccacgtttttcagcctcgacaatcatgctcagagccgcacgatccttaacgctgcccgctgggttattgccctccagcttcagccacacttcgctaccgttgtccggacccatgcgttgcagcttaaccagcggggtattgccaatcgtctgctccagcgtggacatggtgaatcctctcgttgagtgtgcgccactgatttgggtgccatcgacaatggcactgtgcggatcgtggttaaaatctacagagaccaacggcaattccgtatagtcaactataccatgaaatgcaccttgtgctgctttttgcagcaacaggttgacttcgtttaaacgatatcggatccggtaccttatgccaactgacgcagcatacggcgcagcggttccgccgcaccccacagcagctgatcaccaaccgtaaacgcgctcaagaactctgggcccatgttcagcttacgcagacgaccgaccggggtggtcagcgtgcccgtaacggcagccggggtcagctcacgcatggtgatttcacgatcgttaggaaccaccttcgcccacggattgtgggcagccagcagctcttcaaccgtcggaatggacacatctttcttcagcttgatggtgaatgcttgggagtggcaacgcagagcgccaacgcgcacgcacagaccgtcaaccggaataacagaagaggtgttcaggattttgttagtttctgcttgacccttccactcttcacggctttgaccattgtccagctgcttatcgatccacggaatcaggctacccgccagtggcacaccgaagttgtcaaccggcagttcaccggaacgcgtcagggtggtaaccttgcgttcaatgtccaggatcgcggaggacggggtcgccaactcgtcggcaacatgaccatacaggtgacccatctgcgtcaacaattcacgcatgtggcgtgcaccgccaccgctggccgcttggtaggtggccacggaaacccagtcaaccaggtcgttcgcaaacaaaccacccaggctcatcagcatcaagctaacggtacagttgccgccgacaaaggtacggatgccattgttcaggccgtcggtgataacgtcctggttcaccgggtccaaaatgatgatggcgtcatccttcatacgcaggctgctagccgcatcgatccagtaaccttgccagccagattcacgcagcttcgggtagatttcgttcgtatagtcaccaccttggcaagtcacaatgatgtccagagctttcagggcctccaggtcaaaggcgtcctgcagggtacccgtggtaccgccgaagctcggcgcagcctgacccagttggctggtggagaaaaacactgggcgaattgcatcgaagtcacgctcttccaccatacgctgcatcaggacgctgccgaccataccgcgccagccgataaagccgacattcttcatgatcgtttcgcctgtggtatgaaatttcacacgcattatatacaaaaaaagcgattcagaccccgttggcaagccgcgtggttaactcttaacagatctttacacgcccagcttccagctcagggtacgcagcagatccgcgaaaacgccagccgcggtgacatcgttaccggcaccataaccgcgcagcaccagcggcagcggctgatagtaatggctatagaacgccagcgcattctcgccattcttgaccttaaacaaagggtcgttgccatcaacctctgcaatcttaacacggcaaacaccatcctcatcgatgttaccaacataacgcaagactttaccttcgtcgcgggctttcgcaacacgggctgcgaacagatcgtccagctgagacagatttgccataaacgccgcgacatcaccctctgcattgaactccgcaggcagaaccggctcgatctcaatatccgccagttccagttcacggcccgtctcacgcgccagaatcagcagcttacgggcgacatccataccggacaggtcgtcgcgagggtctggttcggtatagcccatttcgcgagccagggtagtcgcttcgctaaagctcatgccttcatccaacttgccgaagatatagctcaggctaccagacaggataccgctgaatttcatcagttcgtcacccgcgttcagcaggttttgcaggttttcgatgaccggcagaccagcgcccacattggtgtcatacaggaacttacgacggcttttctcggctgcataacgcagctgatggtagtagtccatgctgctagtattcgcctttttgttcggcgtaacaacgtgaaagccctcacgcaggaagtcagcgtattggtccgcgaccgcctggctgctggtacaatcgacgatcaccggattcagcaggtggtactctttcaccagacgaatcagacgacccaggttaaacggctcttttgcttgcgccagttcttcctgccaattctccagattcagaccgtgcacattggtcagcaatgctttgctattcgcgacgccgcaaacacgcaggtcgatgtgcttattcttcagccaggattgttggcgtttcagctgttccagcagcgcaccgcccacaccaccgacgccgataacaaaaacttcaatgacttggtccgtgttaaacagcatctggtgagtcacacgaacacccgtggtcgcgtcgtcgttattcaccacaacagaaatgctgcgctcgctgctaccttgtgcaatggccacaatgttgatattcgcgcgtgccagagcagcgaaaaactttgcgctaataccacgcagggtacgcataccatcaccgaccacgctgataatcgccaaacgttcggtaacggccagcggctccagcaggccctctttcagttccagatagaactcttcttgcatcgcacgttctgcacgaacgcaatcggattgcggaacacaaaagctaatgctgtactcgctagagctttgagtaatcaggaccacgctaatgcgagcgcggctcattgctgcaaaaacacgggctgccataccaaccatacctttcatacccggaccgctaacgctgaacatagccatgttgttcagattagagatgcctttaaccggcaattcgtcctcatcacgggacgcaccgatcagggtaccaggtgcctgaggattgccggtattcttgatcaaacacgggatctggaattgagcaattggggtgatcgtgcgcgggtgcaggactttggcaccgaagtaagacagctccatcgcttcctggtacgacatgcttttcagcaagcgcgcgtccgggacctggcgagggtcgcacgtatacacaccatccacatcggtccagatttcgcagcaatcggcacgcaggcaagcagccagaacagcggcgctgtaatcggaaccgttgcgacccaggacaaccagttcgcctttctcgttgcctgccgtaaaacccgccatcagaaccatgtggtcagctgggatgcggctggccgcaatacgacgggtgctctcggcaatatcgacggtgctctccagataatggccgacagccagcagtttctccacagggtcaatgacggtaacgttgtggccgcgtgcctccaacacaccggccatgatcgcgatgctcatcttctcgccacgacagatcagggctgcgttaatgctatccgggcactggcccagcaggctaatgccatgcagaacatgcttaatctgtgcaaattcctgatcgacgaacgttttcagttgcgccaacggaaagcccggttgggctgccgccaggccggtcaacagctcggcaaagatgcgctccgcatcgctgatgttcggcaatgcgtcctgaccgctaatggtcttttcaatcatcgccaccagatggttagtaatctttgccggagcagacaggacggttgcaacctgaccctgacgcgcgttgctctccagaatgtccgcaacgcgcaagaaacgctctgcatttgccacggacgtaccgccaaacttcagcacacgcatggaaatactccttgaaaagtaaagtgttagatgagtgcgttaattcacacttctgagaaatttcgctaaacgcatcaaaaaagcatagcagacaggcatggtattgctggattaagcaggtaacatcagtgttataggattattaccaaaacattatatgacgtctcatgattagactgctggcatgttacgaccgtagtaaatctcacgcatctctttccacagcgcagccgtaatctcttgacgctcgctatccgtcaaatcctccggcttggtatggaacatatagtgtttcagatcgaactctttcagcagcatcttagtgtgaaagatattctcctggtagacattaacgtccaccatatcgtacagagctttcatgtcgtcggacatgaaattctggatgctgttgatctcatggtcgatgaagtgcttcataccattgatgtcacgggtaaagccgcgcacgcggtaatcaatcgtaacgatatcgctctccagttgatggatcaggtaattcaatgctttcagcggcgagataacgccgcaggtgctcacctcaatgtctgcgcgaaaggtacacagaccaccctccgggtggctttccgggtaggtgtgaacgcagatgtggcttttgtccagatgggcaacaaccgtctccggcaacggacctgggtgttcggttttgtcaatcaacttaggatcgacaggctcttcggaaaccaggatcgtcacggaggcaccctgcggttcgtaatcttggcgcgcaatgttcagaatgttcgcgccgatgatggaacaagtctcgctcaaaatctccgtcaggcggtttgcgttgtacagttcatcgatataggcaatgtagccgtcacgttcttccgccgtctttgcatagcaaatgtcatagatacaaaacgacaagctcttagtcagattgttgaaaccgtgcaatttcagcttcttcattttcttatcttctcctcatgagtcgacttagctcggctgagaagccagcgcgtcttgcaggtactgcggcagcgcaaacgcagcggtatggatcgccgggttgtaatagcggcacttcagaccgctcgccaggaaacgtgcttgaatgatttcggtgctcaagtgacgcagcgcgtcattgtcggtggcccacgcaaaggtcataatgccaccatagtacgtcgggatcgctgcctggtagaagccaacgtcgctaaagtaatgagacagtttgcggtggctatcgatcgcctcttcttgctgcaggaaacacacaccattctgcgcgacaaagataccgccagggttcagacaacgtttacaaccctcgtaaaaggcggaggtgaacagggactcaccagggccaatcggatcagtgcaatcggagataatcacatcaaacgtttggctcgtttgattgacgaagttcacaccatcgtcgatgaccagtttgaaacgcgggtcatcatacgagcctgcattatggttcggcaggtattggcgacagaaggacacgacacccgcatcaatctcgaccatggtaatgctctccacgttcttgtgacgggtaacttcgcgcagcatcgcgccatcaccaccgccgataatcaacacatgtttagcatgaccgtgtgccagcagcggcacatgggtcatcatctcgtgatagataaactcatcgcgctcagtggtttggaccacgccgtccagcgccataacgcgaccgaaggccgcgttttcaaagatgatcaggtcttggtggtcggttttctcgtggtacagaacattatcaaccgcgaaatactgaccaaattggtcatgcagcgtctcgtgccactgtttcttctcggccattttagcttccttagctcctgtctagtgtcgacactagtttacaatttctcgcccttcagcaaggtagattgtgcatcacgcggcttaatgacataacaccagacctgtttgcggccgtcatgttcttcaatgtagacaccctgcagctccggcgcaaaacccggcaacagattgataccctcttccagggccgagaagtaacgcagcaccgcaccaccccaaatctcacccggcacgacacacagcacaccaggtgggtacggcagggcaccttcggccgcaatgcggccctccgcatccggcaaacgcaccaactcgacttcaccgcgcagatacgcgtaattggcttcctgcgggttcatgctgacacgcggaaaatgttctttacgaaacatctctttctgcagttgtttgacattgtgacgcgcgtacaaatcatgcatctcttggcacagttgacgcagggtgtagcccgcataacgctcttcgtgctgtttgtaaatgctcggcagcacctcggccagcggggcatcggactccagcaatttctcaaagcggaccagcagtgcaaccagttgctgcaatttggccatatcctctgccggggtcaacaaaaacaggatgctattcagatcacacttctccggcacaacgccattttcacgcagaaagttggccaggatggtggccgggacgccgaacgcctcatactcgccgttacgcgcgtcaatgcctggggtagtcagcagcagtttgcacggatcgacaaagtattgattctctgcgtagccctcgaaagagtgccagtgctcacccggaacgaattggaaaaagcgcaggtccactgcaatttgcgcggtttcatagctctgccatggtttaccgtccaccagctccgggacaaacgggcggatatgttggcagttatccaggatcagtttacgggcgttaatgccgttgacaacgcaatccatccacatgttgcgaccgctcacaccctcgtgcatcttggcattgatgttcagcgcagcgaacagcgggtagaacgggctagtgctcgcatgcatcataaaggcgttattcatacgtttatgcggcacgtagcgttgctggcctttgatgtggctatcctttttgtgaatttggctggtctggctgaaacccgcttgttgcttatgcacagactgggtaaccaaaatgcccggatcgttctcgttcagatccagcaacagcgggctgcagtctgccatcataggaatgaactgctcataaccgacccaggcgctgtcgaacaggatatagtcacacaggtgaccgatcttatccacgacctggcgtgcattgtaaatcgtaccatcatacgtgcccagctgaatcacagccagacggaacggacgggcttctttcgcacgctgcggtgccacctctgcgatcagttcacgcaaatagctttcttcgaagcaatgcgcgtcgatgccaccaatgaagccgtacggattacgcgcggtttccaggtaaaccggggtcgcaccggcttgcaacagcgcaccgtgatggttgcttttgtgattgttacgatcgaacagaaccagatcacctggggtcagcagggcattcagaaccactttgttggagctagaggtaccgttcaggacgaagtaggtcttgtcggcgttgaaaaccttcgctgcgtgttgttgtgcaatacatggtgcgccctcgtggatcagcaggtcacccatagcaacgtccgcattacacagatccgcacgaaacagcgcctcaccaaagtattccacaaactgattgccagccggatgacgacggaagaactcaccaccctggtggcccggacagtcgaacgcgctgttaccctggttgacatagtccaccagtgcacgaaagaacggcggacgcagttgcgtctcatagtggctcgcagccgtttccagctggcgaccgtagaactcacgacggctctcgcaattctcaaaaacgccgctaatacgcggcaggtactcggctggaacacgctcctgattttcggtcgcaatgaacaccggaataccgtaaccggtcgcgtcaatctcatccagcttgccgcacgtaacatcattcaggctcaggacgattgcggcgacatcgatgttacgcgactcattgatatagatgcactcgcgttgcgtcgtaaagcaatccgggcagctgtcgctcaccgcaatcttcaatttgctcattttagcttccttagctcctgactagtataaagttaaagagcagtgccgcttcgctttttccacacattatacgagccggatgattaattgtcaacagctcatttcacccgggattacccgcgacgcgcattaaccacggcgtgccttaaccgcattagccagctgacgcaacagggcgtcggtatcctcccagccgatgcacgcatcggtgatgctcttgccgtatgccagcggttcaccgctttccaggctttgattaccttcgaccagatggctctccaccatgacaccgataatcgccttctcaccgcctgcaatttgttggcaaacgtcggcgcacacatccatttgtttcttgaattgtttgctgctattggcatggctaaagtcgatcatcacctgcgctggcaaacctgctttgttcagaccctctttcacttcagcaacatgctttgcgctgtagttcggctctttgccaccgcgcaggatgatgtgacagtcgccattgccgctcgtattcacgatggcggaatgaccccacttggtcacggacagaaagcagtgcggagcacctgcggcgttgattgcgtcgattgcaactttgatggtaccgtcggtaccattcttgaaaccgaccgggcagctcaaaccgcttgccagctcacgatggacctgagactccgtggtgcgagcgccaattgcaccccagctcatcagatccgccaagtattgcggggtaatcatgtccaggaactcgcctgccgctggcagaccgctgtcgttaatgtccagcagcagtttacgcgcgatacgcagaccatcattgatctgaaagctgttgtccatatgtgggtcgttaatcagacctttccagcccaccgtcgtacgcggtttctcgaaatacacacgcatcacaatctccagctcatctttcagctcttcgcgcagtgccagcaaacgggtcgcatattctttcgctgcaaccgggtcgtgaatggaacacgggccaatgaccaccagcagacgatcgtcattgcccttcagaatcttgtgaatagctttacgggcatgagccacggtgttcgcggcattttccgtcgccggaaacttttccagcagagccactggcggcaacagctctttgatctctttgatacgcaggtcatcattctgatagttcattttaattctccacgcttataagcgaataaaggaagatggccgccccgcagggcagcaggtctgtgaaacagtatagagattcatcggcacaaaggctttgctttttgtcatttattcaaaccggcgccatcagaacggttgtcggattaaaacggcttggtcggcaggtacttaccatccagggtgataaccgcacgttcgccaccttccgggtcggcaaccttcttaacgtccagtttgaagttaatcgcagagatgatgccgtcaccaaacttttcgtggaccagagccttcagagtcgtaccataaacctgcagcatctcatagaagcggtacatcgtcggatcggtcgggatgcggtcatcaatacagccacgcagcgggatcatctgcaacagcagaatgctgtcctcgtccaggtccagcttcgcacccaccagacgcgctgcatctgctggcagtgcctgttgacccaacagtgctgccgtcacgaaggcctccgccaaacccgtaccgtccgcaatctctgcaaagctcaggtctttctttgctttgctcagcagaatcgcgtccgccaaatccaggcgaatgttacggttaatctggctctgaatcatggtggaactcctgatggtttaaaaataagggacgtgttacgctgcggtcggttgacgcaacggaatggcacaaacgcgtggattggcagccagcgggacaaactgacgggtcgcgccgtcgaatgcggcaatgctgccgctctcaatgtcatacacccaaccgtgcagcgcaatgcgaccttcttccaacgccaaacggacgctcggatgcgtttgcagattggccaactgtgcgataacattctcgcgcaccatagccgcagccttagatggcaggtcagagtgcggacgcgcttcgttcaccacacgcgcgctgtccgcgtaacgcaaccagtggctaaccgcaggcatgtggtccatacactggcaagaggcaatagccgtcatcgcaccacaattgctgtggccgcagataacaatatcgctcacgcgcagcgccgcaaccgcgtactcaacgctcgccgagacaccacccggctcaggaccgtaggacggcacgatgttaccggcattacgaatcacgaacaggtcaccaggttcacgttgggtcaccagctccgggaccagacgggagtcgctgcagctaatgaacagcgtacgcgggctttgctgggtagccaactgtttgaacagggcctcacgtttcggaaacgcttcgcgttgaaacttcaagaagccatcaatgatttctttcattttagcttccttagctcctgtgcgcaataaagttaaagagcagtgccgcttcgctttttccacacattatacgagccggatgattaattgtcaacagctcatttcacacgtgagatgtgtataagagacagctgtcagcgctccccgacgagcttcatgccg

SEQ ID NO: 13 - DNA, 1375 bp, Artificial Sequence
  Description of Artificial Sequence: Synthetic polynucleotide
ataaaacgaaaggcccagtctttcgactgagcctttcgttttatttgatgcctggcagttccctactctcgcatggggagaccccacactaccatcggcgctacggcgtttcacttctgagttcggcatggggtcaggtgggaccaccgcgctactgccgccaggcaaatgaggggattacccgcgacgcgcattaaccacggcgtgccttaaccgcattagccagctgacgcaacagggcgtcggtatcctcccagccgatgcacgcatcggtgatgctcttgccgtatgccagcggttcaccgctttccaggctttgattaccttcgaccagatggctctccaccatgacaccgataatcgccttctcaccgcctgcaatttgttggcaaacgtcggcgcacacatccatttgtttcttgaattgtttgctgctattggcatggctaaagtcgatcatcacctgcgctggcaaacctgctttgttcagaccctctttcacttcagcaacatgctttgcgctgtagttcggctctttgccaccgcgcaggatgatgtgacagtcgccattgccgctcgtattcacgatggcggaatgaccccacttggtcacggacagaaagcagtgcggagcacctgcggcgttgattgcgtcgattgcaactttgatggtaccgtcggtaccattcttgaaaccgaccgggcagctcaaaccgcttgccagctcacgatggacctgagactccgtggtgcgagcgccaattgcaccccagctcatcagatccgccaagtattgcggggtaatcatgtccaggaactcgcctgccgctggcagaccgctgtcgttaatgtccagcagcagtttacgcgcgatacgcagaccatcattgatctgaaagctgttgtccatatgtgggtcgttaatcagacctttccagcccaccgtcgtacgcggtttctcgaaatacacacgcatcacaatctccagctcatctttcagctcttcgcgcagtgccagcaaacgggtcgcatattctttcgctgcaaccgggtcgtgaatggaacacgggccaatgaccaccagcagacgatcgtcattgcccttcagaatcttgtgaatagctttacgggcatgagccacggtgttcgcggcattttccgtcgccggaaacttttccagcagagccactggcggcaacagctctttgatctctttgatacgcaggtcatcattctgatagttcattttaattctccacgcttataagcgaataaaggaagatggccgccccgcagggcagcaggtctgtgaaacagtatagagattcatcggcacaaaggctttgctttttgtcatttattcaaaccggcgtga

SEQ ID NO: 14 - DNA, 4222 bp, Artificial Sequence
  Description of Artificial Sequence: Synthetic polynucleotide
ataaaacgaaaggcccagtctttcgactgagcctttcgttttatttgatgcctggcagttccctactctcgcatggggagaccccacactaccatcggcgctacggcgtttcacttctgagttcggcatggggtcaggtgggaccaccgcgctactgccgccaggcaaatgaggtctcatgattagactgctggcatgttacgaccgtagtaaatctcacgcatctctttccacagcgcagccgtaatctcttgacgctcgctatccgtcaaatcctccggcttggtatggaacatatagtgtttcagatcgaactctttcagcagcatcttagtgtgaaagatattctcctggtagacattaacgtccaccatatcgtacagagctttcatgtcgtcggacatgaaattctggatgctgttgatctcatggtcgatgaagtgcttcataccattgatgtcacgggtaaagccgcgcacgcggtaatcaatcgtaacgatatcgctctccagttgatggatcaggtaattcaatgctttcagcggcgagataacgccgcaggtgctcacctcaatgtctgcgcgaaaggtacacagaccaccctccgggtggctttccgggtaggtgtgaacgcagatgtggcttttgtccagatgggcaacaaccgtctccggcaacggacctgggtgttcggttttgtcaatcaacttaggatcgacaggctcttcggaaaccaggatcgtcacggaggcaccctgcggttcgtaatcttggcgcgcaatgttcagaatgttcgcgccgatgatggaacaagtctcgctcaaaatctccgtcaggcggtttgcgttgtacagttcatcgatataggcaatgtagccgtcacgttcttccgccgtctttgcatagcaaatgtcatagatacaaaacgacaagctcttagtcagattgttgaaaccgtgcaatttcagcttcttcattttcttatcttctcctcatgagtcgacttagctcggctgagaagccagcgcgtcttgcaggtactgcggcagcgcaaacgcagcggtatggatcgccgggttgtaatagcggcacttcagaccgctcgccaggaaacgtgcttgaatgatttcggtgctcaagtgacgcagcgcgtcattgtcggtggcccacgcaaaggtcataatgccaccatagtacgtcgggatcgctgcctggtagaagccaacgtcgctaaagtaatgagacagtttgcggtggctatcgatcgcctcttcttgctgcaggaaacacacaccattctgcgcgacaaagataccgccagggttcagacaacgtttacaaccctcgtaaaaggcggaggtgaacagggactcaccagggccaatcggatcagtgcaatcggagataatcacatcaaacgtttggctcgtttgattgacgaagttcacaccatcgtcgatgaccagtttgaaacgcgggtcatcatacgagcctgcattatggttcggcaggtattggcgacagaaggacacgacacccgcatcaatctcgaccatggtaatgctctccacgttcttgtgacgggtaacttcgcgcagcatcgcgccatcaccaccgccgataatcaacacatgtttagcatgaccgtgtgccagcagcggcacatgggtcatcatctcgtgatagataaactcatcgcgctcagtggtttggaccacgccgtccagcgccataacgcgaccgaaggccgcgttttcaaagatgatcaggtcttggtggtcggttttctcgtggtacagaacattatcaaccgcgaaatactgaccaaattggtcatgcagcgtctcgtgccactgtttcttctcggccattttagcttccttagctcctgtctagtgtcgacactagtttacaatttctcgcccttcagcaaggtagattgtgcatcacgcggcttaatgacataacaccagacctgtttgcggccgtcatgttcttcaatgtagacaccctgcagctccggcgcaaaacccggcaacagattgataccctcttccagggccgagaagtaacgcagcaccgcaccaccccaaatctcacccggcacgacacacagcacaccaggtgggtacggcagggcaccttcggccgcaatgcggccctccgcatccggcaaacgcaccaactcgacttcaccgcgcagatacgcgtaattggcttcctgcgggttcatgctgacacgcggaaaatgttctttacgaaacatctctttctgcagttgtttgacattgtgacgcgcgtacaaatcatgcatctcttggcacagttgacgcagggtgtagcccgcataacgctcttcgtgctgtttgtaaatgctcggcagcacctcggccagcggggcatcggactccagcaatttctcaaagcggaccagcagtgcaaccagttgctgcaatttggccatatcctctgccggggtcaacaaaaacaggatgctattcagatcacacttctccggcacaacgccattttcacgcagaaagttggccaggatggtggccgggacgccgaacgcctcatactcgccgttacgcgcgtcaatgcctggggtagtcagcagcagtttgcacggatcgacaaagtattgattctctgcgtagccctcgaaagagtgccagtgctcacccggaacgaattggaaaaagcgcaggtccactgcaatttgcgcggtttcatagctctgccatggtttaccgtccaccagctccgggacaaacgggcggatatgttggcagttatccaggatcagtttacgggcgttaatgccgttgacaacgcaatccatccacatgttgcgaccgctcacaccctcgtgcatcttggcattgatgttcagcgcagcgaacagcgggtagaacgggctagtgctcgcatgcatcataaaggcgttattcatacgtttatgcggcacgtagcgttgctggcctttgatgtggctatcctttttgtgaatttggctggtctggctgaaacccgcttgttgcttatgcacagactgggtaaccaaaatgcccggatcgttctcgttcagatccagcaacagcgggctgcagtctgccatcataggaatgaactgctcataaccgacccaggcgctgtcgaacaggatatagtcacacaggtgaccgatcttatccacgacctggcgtgcattgtaaatcgtaccatcatacgtgcccagctgaatcacagccagacggaacggacgggcttctttcgcacgctgcggtgccacctctgcgatcagttcacgcaaatagctttcttcgaagcaatgcgcgtcgatgccaccaatgaagccgtacggattacgcgcggtttccaggtaaaccggggtcgcaccggcttgcaacagcgcaccgtgatggttgcttttgtgattgttacgatcgaacagaaccagatcacctggggtcagcagggcattcagaaccactttgttggagctagaggtaccgttcaggacgaagtaggtcttgtcggcgttgaaaaccttcgctgcgtgttgttgtgcaatacatggtgcgccctcgtggatcagcaggtcacccatagcaacgtccgcattacacagatccgcacgaaacagcgcctcaccaaagtattccacaaactgattgccagccggatgacgacggaagaactcaccaccctggtggcccggacagtcgaacgcgctgttaccctggttgacatagtccaccagtgcacgaaagaacggcggacgcagttgcgtctcatagtggctcgcagccgtttccagctggcgaccgtagaactcacgacggctctcgcaattctcaaaaacgccgctaatacgcggcaggtactcggctggaacacgctcctgattttcggtcgcaatgaacaccggaataccgtaaccggtcgcgtcaatctcatccagcttgccgcacgtaacatcattcaggctcaggacgattgcggcgacatcgatgttacgcgactcattgatatagatgcactcgcgttgcgtcgtaaagcaatccgggcagctgtcgctcaccgcaatcttcaatttgctcattttagcttccttagctcctgactagtataaagttaaagagcagtgccgcttcgctttttccacacattatacgagccggatgattaattgtcaacagctcatttcacccgtgag

SEQ ID NO: 15 - DNA, 2815 bp, Artificial Sequence
  Description of Artificial Sequence: Synthetic polynucleotide
ataaaacgaaaggcccagtctttcgactgagcctttcgttttatttgatgcctggcagttccctactctcgcatggggagaccccacactaccatcggcgctacggcgtttcacttctgagttcggcatggggtcaggtgggaccaccgcgctactgccgccaggcaaatgagaactcttaacagatctttacacgcccagcttccagctcagggtacgcagcagatccgcgaaaacgccagccgcggtgacatcgttaccggcaccataaccgcgcagcaccagcggcagcggctgatagtaatggctatagaacgccagcgcattctcgccattcttgaccttaaacaaagggtcgttgccatcaacctctgcaatcttaacacggcaaacaccatcctcatcgatgttaccaacataacgcaagactttaccttcgtcgcgggctttcgcaacacgggctgcgaacagatcgtccagctgagacagatttgccataaacgccgcgacatcaccctctgcattgaactccgcaggcagaaccggctcgatctcaatatccgccagttccagttcacggcccgtctcacgcgccagaatcagcagcttacgggcgacatccataccggacaggtcgtcgcgagggtctggttcggtatagcccatttcgcgagccagggtagtcgcttcgctaaagctcatgccttcatccaacttgccgaagatatagctcaggctaccagacaggataccgctgaatttcatcagttcgtcacccgcgttcagcaggttttgcaggttttcgatgaccggcagaccagcgcccacattggtgtcatacaggaacttacgacggcttttctcggctgcataacgcagctgatggtagtagtccatgctgctagtattcgcctttttgttcggcgtaacaacgtgaaagccctcacgcaggaagtcagcgtattggtccgcgaccgcctggctgctggtacaatcgacgatcaccggattcagcaggtggtactctttcaccagacgaatcagacgacccaggttaaacggctcttttgcttgcgccagttcttcctgccaattctccagattcagaccgtgcacattggtcagcaatgctttgctattcgcgacgccgcaaacacgcaggtcgatgtgcttattcttcagccaggattgttggcgtttcagctgttccagcagcgcaccgcccacaccaccgacgccgataacaaaaacttcaatgacttggtccgtgttaaacagcatctggtgagtcacacgaacacccgtggtcgcgtcgtcgttattcaccacaacagaaatgctgcgctcgctgctaccttgtgcaatggccacaatgttgatattcgcgcgtgccagagcagcgaaaaactttgcgctaataccacgcagggtacgcataccatcaccgaccacgctgataatcgccaaacgttcggtaacggccagcggctccagcaggccctctttcagttccagatagaactcttcttgcatcgcacgttctgcacgaacgcaatcggattgcggaacacaaaagctaatgctgtactcgctagagctttgagtaatcaggaccacgctaatgcgagcgcggctcattgctgcaaaaacacgggctgccataccaaccatacctttcatacccggaccgctaacgctgaacatagccatgttgttcagattagagatgcctttaaccggcaattcgtcctcatcacgggacgcaccgatcagggtaccaggtgcctgaggattgccggtattcttgatcaaacacgggatctggaattgagcaattggggtgatcgtgcgcgggtgcaggactttggcaccgaagtaagacagctccatcgcttcctggtacgacatgcttttcagcaagcgcgcgtccgggacctggcgagggtcgcacgtatacacaccatccacatcggtccagatttcgcagcaatcggcacgcaggcaagcagccagaacagcggcgctgtaatcggaaccgttgcgacccaggacaaccagttcgcctttctcgttgcctgccgtaaaacccgccatcagaaccatgtggtcagctgggatgcggctggccgcaatacgacgggtgctctcggcaatatcgacggtgctctccagataatggccgacagccagcagtttctccacagggtcaatgacggtaacgttgtggccgcgtgcctccaacacaccggccatgatcgcgatgctcatcttctcgccacgacagatcagggctgcgttaatgctatccgggcactggcccagcaggctaatgccatgcagaacatgcttaatctgtgcaaattcctgatcgacgaacgttttcagttgcgccaacggaaagcccggttgggctgccgccaggccggtcaacagctcggcaaagatgcgctccgcatcgctgatgttcggcaatgcgtcctgaccgctaatggtcttttcaatcatcgccaccagatggttagtaatctttgccggagcagacaggacggttgcaacctgaccctgacgcgcgttgctctccagaatgtccgcaacgcgcaagaaacgctctgcatttgccacggacgtaccgccaaacttcagcacacgcatggaaatactccttgaaaagtaaagtgttagatgagtgcgttaattcacacttctgagaaatttcgctaaacgcatcaaaaaagcatagcagacaggcatggtattgctggattaagcaggtaacatcagtgttataggattattaccaaaacattatatgtga

SEQ ID NO: 16 - DNA, 1386 bp, Artificial Sequence
  Description of Artificial Sequence: Synthetic polynucleotide
ataaaacgaaaggcccagtctttcgactgagcctttcgttttatttgatgcctggcagttccctactctcgcatggggagaccccacactaccatcggcgctacggcgtttcacttctgagttcggcatggggtcaggtgggaccaccgcgctactgccgccaggcaaatgagaaacgatatcggatccggtaccttatgccaactgacgcagcatacggcgcagcggttccgccgcaccccacagcagctgatcaccaaccgtaaacgcgctcaagaactctgggcccatgttcagcttacgcagacgaccgaccggggtggtcagcgtgcccgtaacggcagccggggtcagctcacgcatggtgatttcacgatcgttaggaaccaccttcgcccacggattgtgggcagccagcagctcttcaaccgtcggaatggacacatctttcttcagcttgatggtgaatgcttgggagtggcaacgcagagcgccaacgcgcacgcacagaccgtcaaccggaataacagaagaggtgttcaggattttgttagtttctgcttgacccttccactcttcacggctttgaccattgtccagctgcttatcgatccacggaatcaggctacccgccagtggcacaccgaagttgtcaaccggcagttcaccggaacgcgtcagggtggtaaccttgcgttcaatgtccaggatcgcggaggacggggtcgccaactcgtcggcaacatgaccatacaggtgacccatctgcgtcaacaattcacgcatgtggcgtgcaccgccaccgctggccgcttggtaggtggccacggaaacccagtcaaccaggtcgttcgcaaacaaaccacccaggctcatcagcatcaagctaacggtacagttgccgccgacaaaggtacggatgccattgttcaggccgtcggtgataacgtcctggttcaccgggtccaaaatgatgatggcgtcatccttcatacgcaggctgctagccgcatcgatccagtaaccttgccagccagattcacgcagcttcgggtagatttcgttcgtatagtcaccaccttggcaagtcacaatgatgtccagagctttcagggcctccaggtcaaaggcgtcctgcagggtacccgtggtaccgccgaagctcggcgcagcctgacccagttggctggtggagaaaaacactgggcgaattgcatcgaagtcacgctcttccaccatacgctgcatcaggacgctgccgaccataccgcgccagccgataaagccgacattcttcatgatcgtttcgcctgtggtatgaaatttcacacgcattatatacaaaaaaagcgattcagaccccgttggcaagccgcgtggttgtga

SEQ ID NO: 17 - DNA, 1264 bp, Artificial Sequence
  Description of Artificial Sequence: Synthetic polynucleotide
ataaaacgaaaggcccagtctttcgactgagcctttcgttttatttgatgcctggcagttccctactctcgcatggggagaccccacactaccatcggcgctacggcgtttcacttctgagttcggcatggggtcaggtgggaccaccgcgctactgccgccaggcaaatgagactgatatcttaaatgcccgcaccctgcgagaagtgttcttcaccaaacacgccagtgctcaaatagcgatcaccgcggtcacaaatgattgcgacgaccactgcatccggattcgccttggcgacgcgcagagcacccgcgactgcaccaccgctgctaacaccacagaagatgccttcgcggactgccagctcgcgcatggtgttttctgcatcgcgctgatggatgtccaacacctcatccaccaggctggcgttaaagatgcccggcagatactccgtaggccaacggcggatgcccggaatgctgctgccttcttccggctgcagacccacaatggtaaccggcttggattgttcgcgcatgaagcggctgacgccggtaatcgtgcccgtcgtgcccatgctcgaaacgaaatgggtaatacgaccaccggtctgttgccaaatctccggaccggtcgtggtatagtgcgcgtacggattgtcaggattgttgaactggtccaacagcttaccctcgccacgattcgccatttccagtgccaggtcacgcgcaccttccataccctgttctttggtaaccaagatcagttccgcaccataagcacgcatcgccgcacgacgttcttgagacatgttatctggcatcagcagtttcatacggtaacccttcagcgcggcaatcattgccagtgcgataccggtgttaccgctggtcgcttcaatcagaacgtcacccggcttgatctcaccacgtttttcagcctcgacaatcatgctcagagccgcacgatccttaacgctgcccgctgggttattgccctccagcttcagccacacttcgctaccgttgtccggacccatgcgttgcagcttaaccagcggggtattgccaatcgtctgctccagcgtggacatggtgaatcctctcgttgagtgtgcgccactgatttgggtgccatcgacaatggcactgtgcggatcgtggttaaaatctacagagaccaacggcaattccgtatagtcaactataccatgaaatgcaccttgtgctgctttttgcagcaacaggttgacttcgtttgtga

SEQ ID NO: 18 - DNA, 1893 bp, Artificial Sequence
  Description of Artificial Sequence: Synthetic polynucleotide
ataaaacgaaaggcccagtctttcgactgagcctttcgttttatttgatgcctggcagttccctactctcgcatggggagaccccacactaccatcggcgctacggcgtttcacttctgagttcggcatggggtcaggtgggaccaccgcgctactgccgccaggcaaatgagctcttaacctgccaggaagaaacggaaggccggattgttcgtctcgtcgtggcagtcataacccagctcattcagacgcgtctcaaaatccggctcgtgatcacccagttcgaacgccgccaggacacggccgtaatcggtgccatggctgcgatagtgaaacagggaaatgttccagtaggtacccagggtgttcaggaaacgcagcagcgcgcctggagactccgggaactcgaagctgtacaggcgctcctgcagcgggtggctcggacggccacccaccatgtaacgaacgtgcagctttgccatttcgtcatcgctcagatcgacaacagaataaccgccgtcattcagcatttgcaggatttctttacgttcttccagaccacggctcagacgcacgcccacgaagatgcatgcgtttttcgcgtctgcgaagcggtaattgaactcggtcacgctacgaccgcccagcaattggcaaaacttcagaaaagagcctttttcttccgggatagtaaccgccagcagtgcttcacgttgctcacccagctcgcaacgttcgctgacgtagcgcagaccgtggaaattcacattcgcaccgctcagaatgtgcgccagacgttcgccacggatgttgtgcagggcaatgtatttcttcatgcccgccagagccagggcaccgctcggctcagcgactgcgcggacatcttcgaacagatccttcattgcggcgcagatcgcatcgctatcgaccgtaatgatatcatccaagtattcctgacacaggcgaaacgtctcatcgccaatgcgtttaactgcaacgccttccgcaaacagaccaacacgcggcagatcgaccgggtggcctgcgtccagtgccgctttcagacatgcgctatcctccgcctcaactgcgatgaccttaatctgcggcatcaattgcttgatcagaacagcaacgcctgccgccaggccaccaccgccaaccggcacaaagacgcggtccagatgcgcgtcctgttgcagcagttccaaggccaacgtgccctgacccgcgatcaccatcggatgatcaaacggcgggacccaggtaaagccttgctgttggctcagttcgatcgctttcgctttagcttcatcgaagtttgcaccgtgcaacagaacttcgccaccaaaaccacgcactgcgtcaaccttaatgtcagcggttgccgtcggcatgacgatcagtgctttaacacccagacgcgcggacgagaaggcgacaccctgcgcgtggttacccgcgctggcggtaatgacgccgtgggctttctgctcttcggtcaaacctgccatcattgcatacgcaccacgcagtttgaagctgtggaccggctggcgatcctcgcgcttcaccaggatcacattatccagacggctgctcagcttttccatcttctgcagcggggtcacctgggctgcctcatacaccggcgcacgcagaaccgcacgcaggtattccgcgccttccggcgcaccgctcagcggctggctgtctgccatggaaatactccttgaaaagtaaagtgttagatgagtgcgttaattcacacttctgagaaatttcgctaaacgcatcaaaaaagcatagcagacaggcatggtattgctggattaagcaggtaacatcagtgttataggattattaccaaaacattatatgaattcgccgtga

SEQ ID NO: 19 - DNA, 2463 bp, Artificial Sequence
  Description of Artificial Sequence: Synthetic polynucleotide
atgcgagtgttgaagttcggcggtacatcagtggcaaatgcagaacgttttctgcgtgttgccgatattctggaaagcaatgccaggcaggggcaggtggccaccgtcctctctgcccccgccaaaatcaccaaccacctggtggcgatgattgaaaaaaccattagcggccaggatgctttacccaatatcagcgatgccgaacgtatttttgccgaacttttgacgggactcgccgccgcccagccggggttcccgctggcgcaattgaaaactttcgtcgatcaggaatttgcccaaataaaacatgtcctgcatggcattagtttgttggggcagtgcccggatagcatcaacgctgcgctgatttgccgtggcgagaaaatgtcgatcgccattatggccggcgtattagaagcgcgcggtcacaacgttactgttatcgatccggtcgaaaaactgctggcagtggggcattacctcgaatctaccgtcgatattgctgagtccacccgccgtattgcggcaagccgcattccggctgatcacatggtgctgatggcaggtttcaccgccggtaatgaaaaaggcgaactggtggtgcttggacgcaacggttccgactactctgctgcggtgctggctgcctgtttacgcgccgattgttgcgagatttggacggacgttgacggggtctatacctgcgacccgcgtcaggtgcccgatgcgaggttgttgaagtcgatgtcctaccaggaagcgatggagctttcctacttcggcgctaaagttcttcacccccgcaccattacccccatcgcccagttccagatcccttgcctgattaaaaataccggaaatcctcaagcaccaggtacgctcattggtgccagccgtgatgaagacgaattaccggtcaagggcatttccaatctgaataacatggcaatgttcagcgtttctggtccggggatgaaagggatggtcggcatggcggcgcgcgtctttgcagcgatgtcacgcgcccgtatttccgtggtgctgattacgcaatcatcttccgaatacagcatcagtttctgcgttccacaaagcgactgtgtgcgagctgaacgggcaatgcaggaagagttctacctggaactgaaagaaggcttactggagccgctggcagtgacggaacggctggccattatctcggtggtaggtgatggtatgcgcaccttgcgtgggatctcggcgaaattctttgccgcactggcccgcgccaatatcaacattgtcgccattgctcagggatcttctgaacgctcaatctctgtcgtggtaaataacgatgatgcgaccactggcgtgcgcgttactcatcagatgctgttcaataccgatcaggttatcgaagtgtttgtgattggcgtcggtggcgttggcggtgcgctgctggagcaactgaagcgtcagcaaagctggctgaagaataaacatatcgacttacgtgtctgcggtgttgccaactcgaaggctctgctcaccaatgtacatggccttaatctggaaaactggcaggaagaactggcgcaagccaaagagccgtttaatctcgggcgcttaattcgcctcgtgaaagaatatcatctgctgaacccggtcattgttgactgcacttccagccaggcagtggcggatcaatatgccgacttcctgcgcgaaggtttccacgttgtcacgccgaacaaaaaggccaacacctcgtcgatggattactaccatcagttgcgttatgcggcggaaaaatcgcggcgtaaattcctctatgacaccaacgttggggctggattaccggttattgagaacctgcaaaatctgctcaatgcaggtgatgaattgatgaagttctccggcattctttctggttcgctttcttatatcttcggcaagttagacgaaggcatgagtttctccgaggcgaccacgctggcgcgggaaatgggttataccgaaccggacccgcgagatgatctttctggtatggatgtggcgcgtaaactattgattctcgctcgtgaaacgggacgtgaactggagctggcggatattgaaattgaacctgtgctgcccgcagagtttaacgccgagggtgatgttgccgcttttatggcgaatctgtcacaactcgacgatctctttgccgcgcgcgtggcgaaggcccgtgatgaaggaaaagttttgcgctatgttggcaatattgatgaagatggcgtctgccgcgtgaagattgccgaagtggatggtaatgatccgctgttcaaagtgaaaaatggcgaaaacgccctggccttctatagccactattatcagccgctgccgttggtactgcgcggatatggtgcgggcaatgacgttacagctgccggtgtctttgctgatctgctacgtaccctctcatggaagttaggagtctga

SEQ ID NO: 20 - DNA, 2123 bp, Artificial Sequence
  Description of Artificial Sequence: Synthetic polynucleotide
ggtcaggtatgatttaaatggtcagtattgagcgatatctagagaattcgtcctggtgacgcaacgtgagcctggcgatctgttcgttattcgcaacgcgggcaatatcgtcccttcctacgggccggaacccggtggcgtttctgcttcggtggagtatgccgtcgctgcgcttcgggtatctgacattgtgatttgtggtcattccaactgtggcgcgatgaccgccattgccagctgtcagtgcatggaccatatgcctgccgtctcccactggctgcgttatgccgattcagcccgcgtcgttaatgaggcgcgcccgcattccgatttaccgtcaaaagctgcggcgatggtacgtgaaaacgtcattgctcagttggctaatttgcaaactcatccatcggtgcgcctggcgctcgaagaggggcggatcgccctgcacggctgggtctacgacattgaaagcggcagcatcgcagcttttgacggcgcaacccgccagtttgtgccactggccgctaatcctcgcgtttgtgccataccgctacgccaaccgaccgcagcgtaaccttatttttaaaccatcaggagttccaccatgattcagtcacaaattaaccgcaatattcgtcttgatcttgccgatgccattttgctcagcaaagctaaaaaagatctctcatttgccgagattgccgacggcaccggtctggcagaagcctttgtaaccgcggctttgctgggtcagcaggcgcttcctgccgacgccgcccgcctggtcggggcgaagctggatctcgacgaagactccattctactgttgcagatgattccactgcgtggctgcattgatgaccgtattccaactgacccaacgatgtatcgtttctatgaaatgttgcaggtgtacggtacaaccctgaaagcgttggttcatgagaaatttggcgatggcattattagcgcgattaacttcaaactcgacgttaagaaagtggcggacccggaaggtggcgaacgtgcggtcatcaccttagatggtaaatatctgccgaccaaaccgttctgacagccatgcgcaaccatcaaaagacgttcacgatgctgctggtactggtgctgattggtcttaatatgcgaccactgctcacctccgtcgggccactgctaccgcaattgcgccaggcgagcggaatgagctttagcgtggctgccctgttgaccgctctgccggtggttaccatgggcgggctggcgctggccggaagctggcttcatcagcatgtcagcgaacgtcgcagtgtcgccatcagtctgttgctgattgccgtcggtgcattgatgcgtgagctttacccgcaaagtgcgctgctgcttagcagcgcactgcttggtggggtggggatcggcatcattcaggcggtgatgccttcggtgattaaacggcggtttcagcagcgcacgccactggtgatggggctgtggtccgcggctctgatgggcggcggtgggcttggtgccgccataacgccctggttagttcaacatagcgaaacctggtatcaaacactcgcctggtgggcgctgcctgccgttgttgcgctctttgcctggtggtggcaaagcgcccgcgaggtcgcctcttcccacaagacaacaaccactccggttcgcgtggtattcactccccgcgcgtggacgctgggtgtttacttcggtctgattaacggcggttacgccagcctgattgcctggttacccgctttctatattgagattggtgccagcgcgcagtacagcggttccttactggcattgatgacgcttgggcaagccgcaggagctttgctgatgcctgctatggctcgccatcaggatcggcgcaaactgttaatgctggcgctggtgttacaactggtggggttctgcggctttatctggctgccgatgcaattgccggtattgtgggcgatggtgtgtgggttaggtctgggcggcgcgtttccgctctgtttgctgctggcgctcgatcactctgtgcaaccggctattgctggcaagaacgaattcaagcttgatatcattcaggacgagcctcagactccagcgtaactggactg

SEQ ID NO: 21 - DNA, 20 bp, Artificial Sequence
  Description of Artificial Sequence: Synthetic primer
gtccctttcagcatcgacat

SEQ ID NO: 22 - DNA, 20 bp, Artificial Sequence
  Description of Artificial Sequence: Synthetic primer
tggtgacgtaccagaaatca

SEQ ID NO: 23 - DNA, 1212 bp, Artificial Sequence
  Description of Artificial Sequence: Synthetic polynucleotide
gtccctttcagcatcgacattcccgtattccgactcgccgttcccacactcattcattaaaagaatatggcgacataccttattggcgacgttcatggttgttacgatgaactgatcgcattgctgcataaagtagaatttacccctgggaaagataccctctggctgacgggcgatctggtcgcgcgcgggccgggttcgctggatgttctgcgctatgtgaaatccttaggcgacagcgtacgtctggtgctgggcaatcacgatctgcatctgctggcggtatttgccgggatcagccgcaataaaccgaaagatcgcctgacaccgctgctggaagcgccggatgccgacgagctgcttaactggctgcggcgccagcctctgctgcaaatcgacgaagagaaaaagctggtgatggcccacgcagggatcacgccgcagtgggatctgcagaccgccaaagagtgcgcacgcgatgtagaagcggtgctatcgagtgactcctatcccttctttcttgatgccatgtacggcgatatgccaaataactggtcaccggaattgcgggggctgggaagactgcgttttatcaccaacgcttttacccgtatgcgtttttgcttcccgaacggtcaactggatatgtacagcaaagaatcgccggaagaggcccctgccccactgaaaccgtggtttgcgattcctggccctgtcgctgaagaatacagcatcgcctttggtcactgggcatcgctggagggcaaaggtacgccggaaggtatatacgcgctggataccggctgctgctggggtggtacattaacctgcctgcgctgggaagataaacagtattttgtccagccgtcgaaccggcataaggatttgggcgaagcggcggcgtcttaaacacagcctgatataggaaggccggataagacgcgaccggcgtcgcatccggcgctagccgtaaattctatacaaaattaccgccgctccagaatctcaaagcaatagctgtgagagttctgcgcatcagcatcgtggaattcgctgaataccgattcccagtcatccggctcgtaatccgggaaatgggtgtcgccttccacttctgcgtcgatatgcgtcagatacagtttttgcgcttttggcaagaactgttcataaacgcgaccgccgccaatcaccatgatttctggtacgtcacca

SEQ ID NO: 24 - DNA, 25 bp, Artificial Sequence
  Description of Artificial Sequence: Synthetic primer
cagctaactgtttgtttttgtttca

SEQ ID NO: 25 - DNA, 21 bp, Artificial Sequence
  Description of Artificial Sequence: Synthetic primer
ggcgctagccgtaaattctat

SEQ ID NO: 26 - DNA, 672 bp, Artificial Sequence
  Description of Artificial Sequence: Synthetic polynucleotide
cagctaactgtttgtttttgtttcattgtaatgcggcgagtccagggagagagcgtggactcgccagcagaatataaaattttcctcaacatcatcctcgcaccagtcgacgacggtttacgctttacgtatagtggcgacaattttttttatcgggaaatctcaatgatcagtctgattgcggcgttagcggtagatcgcgttatcggcatggaaaacgccatgccgtggaacctgcctgccgatctcgcctggtttaaacgcaacaccttaaataaacccgtgattatgggccgccatacctgggaatcaatcggtcgtccgttgccaggacgcaaaaatattatcctcagcagtcaaccgggtacggacgatcgcgtaacgtgggtgaagtcggtggatgaagccatcgcggcgtgtggtgacgtaccagaaatcatggtgattggcggcggtcgcgtttatgaacagttcttgccaaaagcgcaaaaactgtatctgacgcatatcgacgcagaagtggaaggcgacacccatttcccggattacgagccggatgactgggaatcggtattcagcgaattccacgatgctgatgcgcagaactctcacagctattgctttgagattctggagcggcggtaattttgtatagaatttacggctagcgcc

SEQ ID NO: 27 - DNA, 20 bp, Artificial Sequence
  Description of Artificial Sequence: Synthetic primer
tcactgaacaggcagcattc

SEQ ID NO: 28 - DNA, 19 bp, Artificial Sequence
  Description of Artificial Sequence: Synthetic primer
gacgattttgcagcgtttg

SEQ ID NO: 29 - DNA, 1630 bp, Artificial Sequence
  Description of Artificial Sequence: Synthetic polynucleotide
tcactgaacaggcagcattcaccagttcgccttcaaagtgaattgtaccgccatctacaacggcagcataactacccgtagcggcgaatagtgcggcagccagcgcagacgaaataaatcttaatttcatatatattccttcaatctcatttatcgactccacatccgtatataaccgattactttatttaagacactgatagtagtaaattcctttttatcctctaagaatgtcttaattgaaaatatgcactctattctaaaaaatagagagccccgttagatgaatacttccgcgcaaaatatattcaacacaaatatagacctgaagcggtaaattaccaggctgaaaattctttttatattgtcaggtatttcttaaattatcttaatccttagacaaggaaataaatcagttccagatttacaacgccatcatggacgaaaaatgaagctttcagtctcagcgacggtgcgcctcaccttcgcaagaggtcgcttcacgcgataaatctgaaacgaaacctgacagcgcgccccgcttctgacaaaataggcgcatccccttcgatctacgtaacagatggaatcctctctctgatggcagcaaagattattgacggtaaaacgattgcgcagcaggtgcgctctgaagttgctcaaaaagttcaggcgcgtattgcagccggactgcgggcaccaggactggccgttgtgctggtgggtagtaaccctgcatcgcaaatttatgtcgcaagcaaacgcaaggcttgtgaagaagtcgggttcgtctcccgctcttatgacctcccggaaaccaccagcgaagcggagctgctggagcttatcgatacgctgaatgccgacaacaccatcgatggcattctggttcaactgccgttaccggcgggtattgataacgtcaaagtgctggaacgtattcatccggacaaagacgtggacggtttccatccttacaacgtcggtcgtctgtgccagcgcgcgccgcgtctgcgtccctgcaccccgcgcggtatcgtcacgctgcttgagcgttacaacattgataccttcggcctcaacgccgtggtgattggcgcatcgaatatcgttggccgcccgatgagcatggaactgctgctggcaggttgcaccactacagtgactcaccgcttcactaaaaatctgcgtcatcacgtagaaaatgccgatctattgatcgttgccgttggcaagccaggctttattcccggtgactggatcaaagaaggcgcaattgtgattgatgtcggcatcaaccgtctggaaaatggcaaagttgtgggcgacgtcgtgtttgaagacgcggctaaacgcgcctcatacattacgcctgttcccggcggcgttggcccgatgacggttgccacgctgattgaaaacacgctacaggcgtgcgttgaatatcatgatccacaggatgagtaacatggcgacattttctttaggtaaacatccgcacgttgagctgtgcgacttgctgaaactggaaggctggagcgaaagcggcgcgcaggcgaaaatcgcgattgccgaaggccaggtgaaagtcgacggtgcggttgaaacgcgcaaacgctgcaaaatcgtc

SEQ ID NO: 30 - DNA, 20 bp, Artificial Sequence
  Description of Artificial Sequence: Synthetic primer
tcgggcaattatttcgtcat

SEQ ID NO: 31 - DNA, 20 bp, Artificial Sequence
  Description of Artificial Sequence: Synthetic primer
aacaaaccagatgcgatggt

SEQ ID NO: 32 - DNA, 1132 bp, Artificial Sequence
  Description of Artificial Sequence: Synthetic polynucleotide
tcgggcaattatttcgtcatgacggaaaagaagatgaacgacgcgagttagtggtgtttatcacgccacgactggtttccagtgagtaaacagccgtaaaagcggtaatgtttttacgctgaacgtgtttcatctatttgacgcgcgcaggtatttagcatacaaggagtaccgatttgagagttggtgctcttcgctgcctgcgttccatgatgatgatttatcattcaggcggcattttgctgtcttttttacgctaatcttacccggtgatttatcgccagagcggtggtagcaaggcagcgcgcttgcagcgaccagatatgcagagggatgggtgatttattcagttgccaaacccgctggagtattgagataattttcagtctgactctcgcaatatcttatgaggtttcagttcatgtcctgcggcgctctctgagcgaagcgggtttatcattaacgaatagtcttagtagtaccgaaaaaatggcagagaaacgcaatatctttctggttgggcctatgggtgccggaaaaagcactattgggcgccagttagctcaacaactcaatatggaattttacgattccgatcaagagattgagaaacgaaccggagctgatgtgggctgggttttcgatttagaaggcgaagaaggcttccgcgatcgcgaagaaaaggtcatcaatgagttgaccgagaaacagggtattgtgctggctactggcggcggctctgtgaaatcccgtgaaacgcgtaaccgtctttccgctcgtggcgttgtcgtttatcttgaaacgaccatcgaaaagcaacttgcacgcacgcagcgtgataaaaaacgcccgttgctgcacgttgaaacaccgccgcgtgaagttctggaagcgttggccaatgaacgcaatccgctgtatgaagagattgccgacgtgaccattcgtactgatgatcaaagcgctaaagtggttgcaaaccagattattcacatgctggaaagcaactaattctggctttatatacactcgtctgcgggtacagtaattaaggtggatgtcgcgttatggagaggattgtcgttactctcggggaacgtagttacccaattaccatcgcatctggtttgtt

SEQ ID NO: 33 - DNA, 20 bp, Artificial Sequence
  Description of Artificial Sequence: Synthetic primer
cagaatgcgaagacgaacaa

SEQ ID NO: 34 - DNA, 20 bp, Artificial Sequence
  Description of Artificial Sequence: Synthetic primer
gcattagctgggaaatgacc

SEQ ID NO: 35 - DNA, 2491 bp, Artificial Sequence
  Description of Artificial Sequence: Synthetic polynucleotide
cagaatgcgaagacgaacaataaggcctcccaaatcggggggccttttttattgataacaaaaaggcaacactatgacatcggaaaacccgttactggcgctgcgagagaaaatcagcgcgctggatgaaaaattattagcgttactggcagaacggcgcgaactggccgtcgaggtgggaaaagccaaactgctctcgcatcgcccggtacgtgatattgatcgtgaacgcgatttgctggaaagattaattacgctcggtaaagcgcaccatctggacgcccattacattactcgcctgttccagctcatcattgaagattccgtattaactcagcaggctttgctccaacaacatctcaataaaattaatccgcactcagcacgcatcgcttttctcggccccaaaggttcttattcccatcttgcggcgcgccagtatgctgcccgtcactttgagcaattcattgaaagtggctgcgccaaatttgccgatatttttaatcaggtggaaaccggccaggccgactatgccgtcgtaccgattgaaaataccagctccggtgccataaacgacgtttacgatctgctgcaacataccagcttgtcgattgttggcgagatgacgttaactatcgaccattgtttgttggtctccggcactactgatttatccaccatcaatacggtctacagccatccgcagccattccagcaatgcagcaaattccttaatcgttatccgcactggaagattgaatataccgaaagtacgtctgcggcaatggaaaaggttgcacaggcaaaatcaccgcatgttgctgcgttgggaagcgaagctggcggcactttgtacggtttgcaggtactggagcgtattgaagcaaatcagcgacaaaacttcacccgatttgtggtgttggcgcgtaaagccattaacgtgtctgatcaggttccggcgaaaaccacgttgttaatggcgaccgggcaacaagccggtgcgctggttgaagcgttgctggtactgcgcaaccacaatctgattatgacccgtctggaatcacgcccgattcacggtaatccatgggaagagatgttctatctggatattcaggccaatcttgaatcagcggaaatgcaaaaagcattgaaagagttaggggaaatcacccgttcaatgaaggtattgggctgttacccaagtgagaacgtagtgcctgttgatccaacctgatgaaaaggtgccggatgatgtgaatcatccggcactggattattactggcgattgtcattcgcctgacgcaataacacgcggctttcactctgaaaacgctgtgcgtaatcgccgaaccagtgctccaccttgcggaaactgtcaataaacgcctgcttatcgccctgctccagcaactcaatcgcctcgccgaaacgcttatagtaacgtttgattaacgccagattacgctctgacgacataatgatgtcggcataaagctgcggatcctgagcaaacagtcgcccgaccatcgccagctcaaggcggtaaatcggcgaagagagcgccagaagttgctcaagctgaacattttcttctgccaggtgcagcccgtaagcaaaagtagcaaagtggcgcagtgcctgaataaacgccatattctgatcgtgctcgacggcgctaatacgatgcagccgagcgccccagacctgaatttgctccagaaaccattggtatgcttccggtttacgtccatcacaccagaccacaacttgctttgccaggctaccgctgtccggaccgaacatcgggtgtagccccagcaccggaccatcatgcgccaccagcatggcctgtaatggcccatttttcactgatgccagatcgaccagaatacaatctttcggtaaaggcggtaatttgccaataacttgctcagtaacgtggattggcacactaacaatcaccattccggcatcggcaacaatatcagccgctcgatcccagtcatgttgctccagaatccgcacctgataacccgagagggtcagcatcttctcgaacaggcgtcccatctgaccgccaccgccgacgataaccaccggacgcagtgacggacaaagtgttttaaatcctttgtcgttttcactggagtaagattcacgcatcacccgacgcaaaacatcctcaatcagatctggcggtacacccagagcttccgcctctgcacgacgcgaggccaacatagatgcctcgcgctccggaacataaataggcagtccaaagcggcttttcacctcgcccacttcagcaaccagttccagacgcttcgctaataaattcagcagcgctttatcgacttcatcaatttgatcgcgtaatgcggtcaattcagcaaccataataaacctcttaagccacgcgagccgtcagctgcccgttcagatcctgatgaatttcacgcagcaaggcatcggtcatttcccagctaatgc

SEQ ID NO: 36 - DNA, 20 bp, Artificial Sequence
  Description of Artificial Sequence: Synthetic primer
gcattagctgggaaatgacc

SEQ ID NO: 37 - DNA, 20 bp, Artificial Sequence
  Description of Artificial Sequence: Synthetic primer
ttgaagcgttgctggtactg

SEQ ID NO: 38 - DNA, 1484 bp, Artificial Sequence
  Description of Artificial Sequence: Synthetic polynucleotide
gcattagctgggaaatgaccgatgccttgctgcgtgaaattcatcaggatctgaacgggcagctgacggctcgcgtggcttaagaggtttattatggttgctgaattgaccgcattacgcgatcaaattgatgaagtcgataaagcgctgctgaatttattagcgaagcgtctggaactggttgctgaagtgggcgaggtgaaaagccgctttggactgcctatttatgttccggagcgcgaggcatctatgttggcctcgcgtcgtgcagaggcggaagctctgggtgtaccgccagatctgattgaggatgttttgcgtcgggtgatgcgtgaatcttactccagtgaaaacgacaaaggatttaaaacactttgtccgtcactgcgtccggtggttatcgtcggcggtggcggtcagatgggacgcctgttcgagaagatgctgaccctctcgggttatcaggtgcggattctggagcaacatgactgggatcgagcggctgatattgttgccgatgccggaatggtgattgttagtgtgccaatccacgttactgagcaagttattggcaaattaccgcctttaccgaaagattgtattctggtcgatctggcatcagtgaaaaatgggccattacaggccatgctggtggcgcatgatggtccggtgctggggctacacccgatgttcggtccggacagcggtagcctggcaaagcaagttgtggtctggtgtgatggacgtaaaccggaagcataccaatggtttctggagcaaattcaggtctggggcgctcggctgcatcgtattagcgccgtcgagcacgatcagaatatggcgtttattcaggcactgcgccactttgctacttttgcttacgggctgcacctggcagaagaaaatgttcagcttgagcaacttctggcgctctcttcgccgatttaccgccttgagctggcgatggtcgggcgactgtttgctcaggatccgcagctttatgccgacatcattatgtcgtcagagcgtaatctggcgttaatcaaacgttactataagcgtttcggcgaggcgattgagttgctggagcagggcgataagcaggcgtttattgacagtttccgcaaggtggagcactggttcggcgattacgcacagcgttttcagagtgaaagccgcgtgttattgcgtcaggcgaatgacaatcgccagtaataatccagtgccggatgattcacatcatccggcaccttttcatcaggttggatcaacaggcactacgttctcacttgggtaacagcccaataccttcattgaacgggtgatttcccctaactctttcaatgctttttgcatttccgctgattcaagattggcctgaatatccagatagaacatctcttcccatggattaccgtgaatcgggcgtgattccagacgggtcataatcagattgtggttgcgcagtaccagcaacgcttcaa

SEQ ID NO: 39 - DNA, 20 bp, Artificial Sequence
  Description of Artificial Sequence: Synthetic primer
tgcccactggcttaggaata

SEQ ID NO: 40 - DNA, 20 bp, Artificial Sequence
  Description of Artificial Sequence: Synthetic primer
tattcctaagccagtgggca

SEQ ID NO: 41 - DNA, 1749 bp, Artificial Sequence
  Description of Artificial Sequence: Synthetic polynucleotide
ggcatggaagagatgaccagccagctgcagtccatgttccagaacctgggcggccagaagcaaaaagcgcgtaagctgaaaatcaaagacgccatgaagctgctgattgaagaagaagcggcgaaactggtgaacccggaagagctgaagcaagacgctatcgacgctgttgagcagcacgggatcgtgtttatcgacgaaatcgacaaaatctgtaagcgcggcgagtcttccggtccggatgtttctcgtgaaggcgttcagcgtgacctgctgccgctggtagaaggttgcaccgtttccaccaaacacgggatggtcaaaactgaccacattctgtttatcgcttctggcgcgttccagattgcgaaaccgtctgacctgatcccggaactgcaaggtcgtctgccaatccgcgttgaactgcaggcgctgaccaccagcgacttcgagcgtattctgaccgagccgaatgcctctatcaccgtgcagtacaaagcactgatggcgactgaaggcgtaaatatcgagtttaccgactccggtattaaacgcatcgcggaagcggcatggcaggtgaacgaatctaccgaaaacatcggtgctcgtcgtttacacactgttctggagcgtttaatggaagagatttcctacgacgccagcgatttaagcggtcaaaatatcactattgacgcagattatgtgagcaaacatctggatgcgttggtggcagatgaagatctgagccgttttatcctataatcgcgttcaatcattttcatcattgtttgatggggctgaaaggccccatttttattggcgcgtattatgactgaacaacaaattagccgaactcaggcgtggctggaaagtttacgacctaaaaccctccccctcgcctttgctgcaattatcgtcgggacagcgctggcatggtggcaaggtcacttcgatccgctggtcgccctgctggcactaattaccgccgggctattacagatcctttctaacctcgccaatgattacggcgatgcggtaaaaggcagcgataaacctgaccgcattgggccgctacgcggcatgcaaaaaggggtcattacccagcaagagatgaaacgggcgctcattattaccgtcgtgctcatctgtctctccgggctggcactggttgcagtggcatgccatacgctggccgattttgtcggtttcctgattcttggcgggttgtcgatcattgccgctatcacctacaccgtgggcaatcgtccttatggttatatcggtctgggtgatatttccgtactggttttctttggctggttgagtgtcatggggagctggtatttacaggctcatacattgattccggcactgatccttccggcgaccgcatgcggcctgctggcaacggcagtactgaatattaataacctgcgtgatatcaatagcgaccgcgaaaatggcaaaaacacgctggtggtgcgcttaggtgaagtgaacgcgcgtcgttatcatgcctgcctgctgatgggctcgctggtgtgtctggcgctgtttaatctcttttcgctgcatagcctgtggggctggctgttcctgctggcggcaccattactggtgaagcaagcccgttatgtgatgcgggaaatggacccggtggcgatgcgaccaatgctggaacgtactgtcaagggagcgttactgactaacctgctgtttgttttagggatattcctaagccagtgggca

SEQ ID NO: 42 - DNA, 20 bp, Artificial Sequence
  Description of Artificial Sequence: Synthetic primer
aaacatctggatgcgttggt

SEQ ID NO: 43 - DNA, 20 bp, Artificial Sequence
  Description of Artificial Sequence: Synthetic primer
ttctcgcagcaactgaatgt

SEQ ID NO: 44 - DNA, 1132 bp, Artificial Sequence
  Description of Artificial Sequence: Synthetic polynucleotide
aaacatctggatgcgttggtggcagatgaagatctgagccgttttatcctataatcgcgttcaatcattttcatcattgtttgatggggctgaaaggccccatttttattggcgcgtattatgactgaacaacaaattagccgaactcaggcgtggctggaaagtttacgacctaaaaccctccccctcgcctttgctgcaattatcgtcgggacagcgctggcatggtggcaaggtcacttcgatccgctggtcgccctgctggcactaattaccgccgggctattacagatcctttctaacctcgccaatgattacggcgatgcggtaaaaggcagcgataaacctgaccgcattgggccgctacgcggcatgcaaaaaggggtcattacccagcaagagatgaaacgggcgctcattattaccgtcgtgctcatctgtctctccgggctggcactggttgcagtggcatgccatacgctggccgattttgtcggtttcctgattcttggcgggttgtcgatcattgccgctatcacctacaccgtgggcaatcgtccttatggttatatcggtctgggtgatatttccgtactggttttctttggctggttgagtgtcatggggagctggtatttacaggctcatacattgattccggcactgatccttccggcgaccgcatgcggcctgctggcaacggcagtactgaatattaataacctgcgtgatatcaatagcgaccgcgaaaatggcaaaaacacgctggtggtgcgcttaggtgaagtgaacgcgcgtcgttatcatgcctgcctgctgatgggctcgctggtgtgtctggcgctgtttaatctcttttcgctgcatagcctgtggggctggctgttcctgctggcggcaccattactggtgaagcaagcccgttatgtgatgcgggaaatggacccggtggcgatgcgaccaatgctggaacgtactgtcaagggagcgttactgactaacctgctgtttgttttagggatattcctaagccagtgggcagcataactgacaaatatcaattaacaattgatgattttgccaacagcccacatagcgcgatatactgaaaattctcgcagcaactgaatgt

SEQ ID NO: 45 - DNA, 20 bp, Artificial Sequence
  Description of Artificial Sequence: Synthetic primer
aaaatcattgcttcggttgc

SEQ ID NO: 46 - DNA, 20 bp, Artificial Sequence
  Description of Artificial Sequence: Synthetic primer
tttatcccttctccacaccg

SEQ ID NO: 47 - DNA, 1907 bp, Artificial Sequence
  Description of Artificial Sequence: Synthetic polynucleotide
aaaatcattgcttcggttgcagaaaaatttatctgtattgcagacgcttccaagcaggttgatattctgggtaaattcccgctgccagtagaagttatcccgatggcacgtagtgcagtggcgcgtcagctggtgaaactgggcggtcgtccggaataccgtcagggcgtggtgaccgataatggcaacgtgatcctcgacgtccacggcatggaaatccttgacccgatagcgatggaaaacgccataaatgcgattcctggcgtggtgactgttggcttgtttgctaaccgtggcgcggacgttgcgctgattggcacacctgacggtgtcaaaaccattgtgaaatgatctgacgggggaacctcccccgttaaaaaaattctcttcattaaatttggtgacatgtgtcacgcttttaccaggcaattgtcgattgctctaaataaatcctctaaaccagcatattcatccaagaattacctttgcgtgatatttcctcaacatcgcgacgcaaacgttcatattgccgcaatattattttttgatatgttgaaaggcggatgcaaatccgcacacaacatttcaaaagacaggattgggtaaatggcaaaggtatcgctggagaaagacaagattaagtttctgctggtagaaggcgtgcaccaaaaggcgctggaaagccttcgtgcagctggttacaccaacatcgaatttcacaaaggcgcgctggatgatgaacaattaaaagaatccatccgcgatgcccacttcatcggcctgcgatcccgtacccatctgactgaagacgtgatcaacgccgcagaaaaactggtcgctattggctgtttctgtatcggaacaaaccaggttgatctggatgcggcggcaaagcgcgggatcccggtatttaacgcaccgttctcaaatacgcgctctgttgcggagctggtgattggcgaactgctgctgctattgcgcggcgtgccggaagccaatgctaaagcgcaccgtggcgtgtggaacaaactggcggcgggttcttttgaagcgcgcggcaaaaagctgggtatcatcggctacggtcatattggtacgcaattgggcattctggctgaatcgctgggaatgtatgtttacttttatgatattgaaaataaactgccgctgggcaacgccactcaggtacagcatctttctgacctgctgaatatgagcgatgtggtgagtctgcatgtaccagagaatccgtccaccaaaaatatgatgggcgcgaaagaaatttcactaatgaagcccggctcgctgctgattaatgcttcgcgcggtactgtggtggatattccggcgctgtgtgatgcgctggcgagcaaacatctggcgggggcggcaatcgacgtattcccgacggaaccggcgaccaatagcgatccatttacctctccgctgtgtgaattcgacaacgtccttctgacgccacacattggcggttcgactcaggaagcgcaggagaatatcggcctggaagttgcgggtaaattgatcaagtattctgacaatggctcaacgctctctgcggtgaacttcccggaagtctcgctgccactgcacggtgggcgtcgtctgatgcacatccacgaaaaccgtccgggcgtgctaactgcgctgaacaaaatcttcgccgagcagggcgtcaacatcgccgcgcaatatctgcaaacttccgcccagatgggttatgtggttattgatattgaagccgacgaagacgttgccgaaaaagcgctgcaggcaatgaaagctattccgggtaccattcgcgcccgtctgctgtactaattccccttctctgaaaatcaacgggcaggtcactgacttgcccgtttttttatcccttctccacaccg

SEQ ID NO: 48 - DNA, 20 bp, Artificial Sequence
  Description of Artificial Sequence: Synthetic primer
tccggcaacatcaaattaca

SEQ ID NO: 49 - DNA, 20 bp, Artificial Sequence
  Description of Artificial Sequence: Synthetic primer
tctttcagagcaaccgcttt

SEQ ID NO: 50 - DNA, 2379 bp, Artificial Sequence
  Description of Artificial Sequence: Synthetic polynucleotide
tccggatgtttccatccggcaacatcaaattacagcaccttatgcgggccaaagcattcgtaatgaatgttttcctgcttcacgcccagatccactaactgtttcgcggtaaactgcatgaagccaaccgggccgcagagatagaactgcattgtcggatcgctgaacgcaccttccagtttgctcaaatccatcagaccttcgctatcaaactgacctttagcgcgatcggcttcgctcggctgacgataccaggtgtgcgcggtaaagcgcggcagtgactgccccagttccttaacttcatcggcaaaggcgtgaacatcgccattttctgccgcatggaaccagttcacttgtgctgtgtggcctgcttttgccagcgtgtcgagcattgccagcattggcgtttgaccaacaccggcagagattaacgtcactggtgtgtcatctgcgacagccataaagaaatcacctgccggagcgaccagtttcacgacatcgccaacattggcgtgattgtgcaaccagttggatacctgcccaccctcttcgcgtttcaccgcaatacgatagcctttgccatccggtttgcgagtcaaagagtactgacgaatttcctgatgtgggaaaccttccggcttcagccagacgccgagatattgccccggacggtattctgccactgcgccaccgtcgaccggctccagttcgaagctggtgataagcgcgctgcgcggtgttttagccacaatgcggaaatcgcgagtaccttcccaaccaccggctttgctggcgttttcgttatagatttccgcctcgcgattgataaatacattagccagtacaccataggctttaccccacgcgtccagcacttcctgccccgggctgaacatttcgtccagcgttgccaacaggtgttcaccgacgatgttgtactgttccggtttgatctggaagctggtgtgcttctgcgcgattttttctaccgctggcagcagcgcaggcaggttttcaatattactggcgtaggcggcaatagcgttaaacagggcttcacgttgatcgccattacgctggttactcatgttaaaaatttctttgagttctgggttatgagtaaacatacggtcgtagaaatgggcggttaactttggccccgtttccaccagtaaagggatggtggcttttactgtagcgatggtttgagcgtcaagcatatggtcttcctttttttgcatcttaattgatgtatctcaaatgcatcttataaaaaatagccctgcaatgtaaatggttctttggtgtttttcagaaagaatgtgatgaagtgaaaaatttgcatcacaaacctgaaaagaaatccgtttccggttgcaagctctttattctccaaagccttgcgtagcctgaaggtaatcgtttgcgtaaattcctttgtcaagacctgttatcgcacaatgattcggttatactgttcgccgttgtccaacaggaccgcctataaaggccaaaaattttattgttagctgagtcaggagatgcggatgttaaagcgtgaaatgaacattgccgattatgatgccgaactgtggcaggctatggagcaggaaaaagtacgtcaggaagagcacatcgaactgatcgcctccgaaaactacaccagcccgcgcgtaatgcaggcgcagggttctcagctgaccaacaaatatgctgaaggttatccgggcaaacgctactacggcggttgcgagtatgttgatatcgttgaacaactggcgatcgatcgtgcgaaagaactgttcggcgctgactacgctaacgtccagccgcactccggctcccaggctaactttgcggtctacaccgcgctgctggaaccaggtgataccgttctgggtatgaacctggcgcatggcggtcacctgactcacggttctccggttaacttctccggtaaactgtacaacatcgttccttacggtatcgatgctaccggtcatatcgactacgccgatctggaaaaacaagccaaagaacacaagccgaaaatgattatcggtggtttctctgcatattccggcgtggtggactgggcgaaaatgcgtgaaatcgctgacagcatcggtgcttacctgttcgttgatatggcgcacgttgcgggcctggttgctgctggcgtctacccgaacccggttcctcatgctcacgttgttactaccaccactcacaaaaccctggcgggtccgcgcggcggcctgatcctggcgaaaggtggtagcgaagagctgtacaaaaaactgaactctgccgttttccctggtggtcagggcggtccgttgatgcacgtaatcgccggtaaagcggttgctctgaaag

SEQ ID NO: 51 - DNA, 20 bp, Artificial Sequence
  Description of Artificial Sequence: Synthetic primer
agcgttaaacagggcttcac

SEQ ID NO: 52 - DNA, 20 bp, Artificial Sequence
  Description of Artificial Sequence: Synthetic primer
gttttgtaggccggataagg

SEQ ID NO: 53 - DNA, 1839 bp, Artificial Sequence
  Description of Artificial Sequence: Synthetic polynucleotide
agcgttaaacagggcttcacgttgatcgccattacgctggttactcatgttaaaaatttctttgagttctgggttatgagtaaacatacggtcgtagaaatgggcggttaactttggccccgtttccaccagtaaagggatggtggcttttactgtagcgatggtttgagcgtcaagcatatggtcttcctttttttgcatcttaattgatgtatctcaaatgcatcttataaaaaatagccctgcaatgtaaatggttctttggtgtttttcagaaagaatgtgatgaagtgaaaaatttgcatcacaaacctgaaaagaaatccgtttccggttgcaagctctttattctccaaagccttgcgtagcctgaaggtaatcgtttgcgtaaattcctttgtcaagacctgttatcgcacaatgattcggttatactgttcgccgttgtccaacaggaccgcctataaaggccaaaaattttattgttagctgagtcaggagatgcggatgttaaagcgtgaaatgaacattgccgattatgatgccgaactgtggcaggctatggagcaggaaaaagtacgtcaggaagagcacatcgaactgatcgcctccgaaaactacaccagcccgcgcgtaatgcaggcgcagggttctcagctgaccaacaaatatgctgaaggttatccgggcaaacgctactacggcggttgcgagtatgttgatatcgttgaacaactggcgatcgatcgtgcgaaagaactgttcggcgctgactacgctaacgtccagccgcactccggctcccaggctaactttgcggtctacaccgcgctgctggaaccaggtgataccgttctgggtatgaacctggcgcatggcggtcacctgactcacggttctccggttaacttctccggtaaactgtacaacatcgttccttacggtatcgatgctaccggtcatatcgactacgccgatctggaaaaacaagccaaagaacacaagccgaaaatgattatcggtggtttctctgcatattccggcgtggtggactgggcgaaaatgcgtgaaatcgctgacagcatcggtgcttacctgttcgttgatatggcgcacgttgcgggcctggttgctgctggcgtctacccgaacccggttcctcatgctcacgttgttactaccaccactcacaaaaccctggcgggtccgcgcggcggcctgatcctggcgaaaggtggtagcgaagagctgtacaaaaaactgaactctgccgttttccctggtggtcagggcggtccgttgatgcacgtaatcgccggtaaagcggttgctctgaaagaagcgatggagcctgagttcaaaacttaccagcagcaggtcgctaaaaacgctaaagcgatggtagaagtgttcctcgagcgcggctacaaagtggtttccggcggcactgataaccacctgttcctggttgatctggttgataaaaacctgaccggtaaagaagcagacgccgctctgggccgtgctaacatcaccgtcaacaaaaacagcgtaccgaacgatccgaagagcccgtttgtgacctccggtattcgtgtaggtactccggcgattacccgtcgcggctttaaagaagccgaagcgaaagaactggctggctggatgtgtgacgtgctggacagcatcaatgatgaagccgttatcgagcgcatcaaaggtaaagttctcgacatctgcgcacgttacccggtttacgcataagcgaaacggtgatttgctgtcaatgtgctcgttgttcatgccggatgcggcgtgaacgccttatccggcctacaaaac

SEQ ID NO: 54 - DNA, 20 bp, Artificial Sequence
  Description of Artificial Sequence: Synthetic primer
gtttaaggaacgcgcttcag

SEQ ID NO: 55 - DNA, 20 bp, Artificial Sequence
  Description of Artificial Sequence: Synthetic primer
gacgcaaacgcacacctaat

SEQ ID NO: 56 - DNA, 1251 bp, Artificial Sequence
  Description of Artificial Sequence: Synthetic polynucleotide
gtttaaggaacgcgcttcagccagcagttgctgctcgcgcttaaggcgacgcttctgattgaagaactctacgctcttactgaagaagattgcccaggtgactacggaggccaaaataagcccaatcatcacgcacttaacgacaatatcggcgtgctgatacataccccagacggaaaggtccgtctgcattaaattattacccactgtgtatctccaggacgcaagtcacaaaatctgcgcataataatatcaaaacgacgtcgaattgatagtcgttctcattactatttgcatactgccgtacctttgctttcttttccttgcgtttacgcagtaaaaaagtcaccagcacgccatttgcgaaaattttctgctttatgccaattcttcaggatgcgcccgcgaatattcatgctagtttagacatccagacgtataaaaacaggaatcccgacatggcggacaaaaagcttgatactcaactggtgaatgcaggacgcagcaaaaaatacactctcggcgcggtaaatagcgtgattcagcgcgcttcttcgctggtctttgacagtgtagaagccaaaaaacacgcgacacgtaatcgcgccaatggagagttgttctatggacggcgcggaacgttaacccatttctccttacaacaagcgatgtgtgaactggaaggtggcgcaggctgcgtgctatttccctgcggggcggcagcggttgctaattccattcttgcttttatcgaacagggcgatcatgtgttgatgaccaacaccgcctatgaaccgagtcaggatttctgtagcaaaatcctcagcaaactgggcgtaacgacatcatggtttgatccgctgattggtgccgatatcgttaagcatctgcagccaaacactaaaatcgtgtttctggaatcgccaggctccatcaccatggaagtccacgacgttccggcgattgttgccgccgtacgcagtgtggtgccggatgccatcattatgatcgacaacacctgggcagccggtgtgctgtttaaggcgctggattttggcatcgatgtttctattcaagccgccaccaaatatctggttgggcattcagatgcgatgattggcactgccgtgtgcaatgcccgttgctgggagcagctacgggaaaatgcctatctgatgggccagatggtcgatgccgataccgcctatataaccagccgtggcctgcgcacattaggtgtgcgtttgcgtc

SEQ ID NO: 57 - DNA, 19 bp, Artificial Sequence
  Description of Artificial Sequence: Synthetic primer
agcgcgaggcatctatgtt

SEQ ID NO: 58 - DNA, 20 bp, Artificial Sequence
  Description of Artificial Sequence: Synthetic primer
atcagcggaaatgcaaaaag

SEQ ID NO: 59 - DNA, 1131 bp, Artificial Sequence
  Description of Artificial Sequence: Synthetic polynucleotide
agcgcgaggcatctatgttggcctcgcgtcgtgcagaggcggaagctctgggtgtaccgccagatctgattgaggatgttttgcgtcgggtgatgcgtgaatcttactccagtgaaaacgacaaaggatttaaaacactttgtccgtcactgcgtccggtggttatcgtcggcggtggcggtcagatgggacgcctgttcgagaagatgctgaccctctcgggttatcaggtgcggattctggagcaacatgactgggatcgagcggctgatattgttgccgatgccggaatggtgattgttagtgtgccaatccacgttactgagcaagttattggcaaattaccgcctttaccgaaagattgtattctggtcgatctggcatcagtgaaaaatgggccattacaggccatgctggtggcgcatgatggtccggtgctggggctacacccgatgttcggtccggacagcggtagcctggcaaagcaagttgtggtctggtgtgatggacgtaaaccggaagcataccaatggtttctggagcaaattcaggtctggggcgctcggctgcatcgtattagcgccgtcgagcacgatcagaatatggcgtttattcaggcactgcgccactttgctacttttgcttacgggctgcacctggcagaagaaaatgttcagcttgagcaacttctggcgctctcttcgccgatttaccgccttgagctggcgatggtcgggcgactgtttgctcaggatccgcagctttatgccgacatcattatgtcgtcagagcgtaatctggcgttaatcaaacgttactataagcgtttcggcgaggcgattgagttgctggagcagggcgataagcaggcgtttattgacagtttccgcaaggtggagcactggttcggcgattacgcacagcgttttcagagtgaaagccgcgtgttattgcgtcaggcgaatgacaatcgccagtaataatccagtgccggatgattcacatcatccggcaccttttcatcaggttggatcaacaggcactacgttctcacttgggtaacagcccaataccttcattgaacgggtgatttcccctaactctttcaatgctttttgcatttccgctgat

SEQ ID NO: 60 - DNA, 25 bp, Artificial Sequence
  Description of Artificial Sequence: Synthetic primer
tgcctgtgtaaataaaaatgtacga

SEQ ID NO: 61 - DNA, 20 bp, Artificial Sequence
  Description of Artificial Sequence: Synthetic primer
gcctgttgatccaacctgat

SEQ ID NO: 62 - DNA, 2382 bp, Artificial Sequence
  Description of Artificial Sequence: Synthetic polynucleotide
tgcctgtgtaaataaaaatgtacgaaatatggattgaaaactttactttatgtgttatcgttacgtcatcctcgctgaggatcaactatcgcaaacgagcataaacaggatcgccatcatgcaaaaagacgcgctgaataacgtacatattaccgacgaacaggttttaatgactccggaacaactgaaggccgcttttccattgagcctgcaacaagaagcccagattgctgactcgcgtaaaagcatttcagatattatcgccgggcgcgatcctcgtctgctggtagtatgtggtccttgttccattcatgatccggaaactgctctggaatatgctcgtcgatttaaagcccttgccgcagaggtcagcgatagcctctatctggtaatgcgcgtctattttgaaaaaccccgtaccactgtcggctggaaagggttaattaacgatccccatatggatggctcttttgatgtagaagccgggctgcagatcgcgcgtaaattgctgcttgagctggtgaatatgggactgccactggcgacggaagcgttagatccgaatagcccgcaatacctgggcgatctgtttagctggtcagcaattggtgctcgtacaacggaatcgcaaactcaccgtgaaatggcctccgggctttccatgccggttggttttaaaaacggcaccgacggcagtctggcaacagcaattaacgctatgcgcgccgccgcccagccgcaccgttttgttggcattaaccaggcagggcaggttgcgttgctacaaactcaggggaatccggacggccatgtgatcctgcgcggtggtaaagcgccgaactatagccctgcggatgttgcgcaatgtgaaaaagagatggaacaggcgggactgcgcccgtctctgatggtagattgcagccacggtaattccaataaagattatcgccgtcagcctgcggtggcagaatccgtggttgctcaaatcaaagatggcaatcgctcaattattggtctgatgatcgaaagtaatatccacgagggcaatcagtcttccgagcaaccgcgcagtgaaatgaaatacggtgtatccgtaaccgatgcctgcattagctgggaaatgaccgatgccttgctgcgtgaaattcatcaggatctgaacgggcagctgacggctcgcgtggcttaagaggtttattatggttgctgaattgaccgcattacgcgatcaaattgatgaagtcgataaagcgctgctgaatttattagcgaagcgtctggaactggttgctgaagtgggcgaggtgaaaagccgctttggactgcctatttatgttccggagcgcgaggcatctatgttggcctcgcgtcgtgcagaggcggaagctctgggtgtaccgccagatctgattgaggatgttttgcgtcgggtgatgcgtgaatcttactccagtgaaaacgacaaaggatttaaaacactttgtccgtcactgcgtccggtggttatcgtcggcggtggcggtcagatgggacgcctgttcgagaagatgctgaccctctcgggttatcaggtgcggattctggagcaacatgactgggatcgagcggctgatattgttgccgatgccggaatggtgattgttagtgtgccaatccacgttactgagcaagttattggcaaattaccgcctttaccgaaagattgtattctggtcgatctggcatcagtgaaaaatgggccattacaggccatgctggtggcgcatgatggtccggtgctggggctacacccgatgttcggtccggacagcggtagcctggcaaagcaagttgtggtctggtgtgatggacgtaaaccggaagcataccaatggtttctggagcaaattcaggtctggggcgctcggctgcatcgtattagcgccgtcgagcacgatcagaatatggcgtttattcaggcactgcgccactttgctacttttgcttacgggctgcacctggcagaagaaaatgttcagcttgagcaacttctggcgctctcttcgccgatttaccgccttgagctggcgatggtcgggcgactgtttgctcaggatccgcagctttatgccgacatcattatgtcgtcagagcgtaatctggcgttaatcaaacgttactataagcgtttcggcgaggcgattgagttgctggagcagggcgataagcaggcgtttattgacagtttccgcaaggtggagcactggttcggcgattacgcacagcgttttcagagtgaaagccgcgtgttattgcgtcaggcgaatgacaatcgccagtaataatccagtgccggatgattcacatcatccggcaccttttcatcaggttggatcaacaggc

SEQ ID NO: 63 - DNA, 21 bp, Artificial Sequence
  Description of Artificial Sequence: Synthetic primer
aacctgcaaagagacgctatc

SEQ ID NO: 64 - DNA, 20 bp, Artificial Sequence
  Description of Artificial Sequence: Synthetic primer
atcgagttttggttgggatg

SEQ ID NO: 65 - DNA, 1867 bp, Artificial Sequence
  Description of Artificial Sequence: Synthetic polynucleotide
aacctgcaaagagacgctatcgcagctgcgatagatgttctcaatgaagaacgtgtcatcgcctatccaacggaagccgttttcggtgttgggtgcgatcctgatagcgaaacagcagtgatgcgactgttggagttaaaacagcgtccggttgataaggggctgattttaatcgcagcaaattacgagcagcttaaaccctatattgatgacaccatgttgactgacgtgcagcgtgaaaccattttttcccgctggccaggtcctgtcacctttgtctttcccgcgcctgcgacaacaccgcgctggttgacgggccgctttgattcgcttgctgtacgagtcaccgaccatccgttggtggttgctttgtgccaggcttatggtaaaccgctggtttctaccagtgccaacttgagtggattgccaccttgtcgaacagtagacgaagttcgcgcacaatttggcgcggcgttcccggttgtgcctggtgaaacgggggggcgtttaaatccttcagaaatccgcgatgccctgacgggtgaactgtttcgacaggggtaacataatggaaacctatgctgtttttggtaatccgatagcccacagcaaatcgccattcattcatcagcaatttgctcagcaactgaatattgaacatccctatgggcgcgtgttggcacccatcaatgatttcatcaacacactgaacgctttctttagtgctggtggtaaaggtgcgaatgtgacggtgccttttaaagaagaggcttttgccagagcggatgagcttactgaacgggcagcgttggctggtgctgttaataccctcatgcggttagaagatggacgcctgctgggtgacaataccgatggtgtaggcttgttaagcgatctggaacgtctgtcttttatccgccctggtttacgtattctgcttatcggcgctggtggagcatctcgcggcgtactactgccactcctttccctggactgtgcggtgacaataactaatcggacggtatcccgcgcggaagagttggctaaattgtttgcgcacactggcagtattcaggcgttgagtatggacgaactggaaggtcatgagtttgatctcattattaatgcaacatccagtggcatcagtggtgatattccggcgatcccgtcatcgctcattcatccaggcatttattgctatgacatgttctatcagaaaggaaaaactccttttctggcatggtgtgagcagcgaggctcaaagcgtaatgctgatggtttaggaatgctggtggcacaggcggctcatgcctttcttctctggcacggtgttctgcctgacgtagaaccagttataaagcaattgcaggaggaattgtccgcgtgaatcaggccatccagtttccggacagggaagagtgggacgagaataaaaaatgtgtatgttttcccgctctcgtgaatggtatgcaactgacatgcgcgatctctggcgagagtctggcgtatcgctttactggagatacgccagaacagtggttagcgagttttcgtcagcatcgctgggacctggaagaagaagcggaaaacttaattcaggaacaaagtgaagatgatcaaggctgggtctggttaccctgatccagatattcgtccttccatttcacgtaattattcgcggaatagcgtaacccagccttctcttcatcacttaacgggcggatctgtttgacggggctaccgagatacagatatccgctctccagccgtttattttgtgggaccagactacccgcaccaatcatcacatcatcttctactattgcgccatcaagtaaaattgagcccatcccaaccaaaactcgat

SEQ ID NO: 66 - DNA, 20 bp, Artificial Sequence
  Description of Artificial Sequence: Synthetic primer
atatcgccctgcacaacatt

SEQ ID NO: 67 - DNA, 20 bp, Artificial Sequence
  Description of Artificial Sequence: Synthetic primer
tgcgtaatcaggtgtcggta

SEQ ID NO: 68 - DNA, 1066 bp, Artificial Sequence
  Description of Artificial Sequence: Synthetic polynucleotide
atatcgccctgcacaacattcgcggcgaacggctggcgcatattctttccggtgccaacgtgaacttccacggcctgcgctacgtctcagaacgctgcgaactgggcgaacagcgtgaagcgttgttggcggtgaccattccggaagaaaaaggcagcttcctcaaattctgccaactgcttggcgggcgttcggtcaccgagttcaactaccgttttgccgatgccaaaaacgcctgcatctttgtcggtgtgcgcctgagccgcggcctcgaagagcgcaaagaaattttgcagatgctcaacgacggcggctacagcgtggttgatctctccgacgacgaaatggcgaagctacacgtgcgctatatggtcggcggacgtccatcgcatccgttgcaggaacgcctctacagcttcgaattcccggaatcaccgggcgcgctgctgcgcttcctcaacacgctgggtacgtactggaacatttctttgttccactatcgcagccatggcaccgactacgggcgcgtactggcggcgttcgaacttggcgaccatgaaccggatttcgaaacccggctgaatgagctgggctacgattgccacgacgaaaccaataacccggcgttcaggttctttttggcgggttagggaaaaatgcctgatagcgcttcgcttatcaggcctacccgcgcgacaacgtcatttgtggttcggcaaaatcttccagaatgcctcaattagcggctcatgtagccgctttttctgcgcacacacgcccagctcaaacggcgttttctcatcgctgcgctctaaaatcatcacgcggttacgcaccggttcggggctgttttccagcaccacttccggcaacaatgccacgccacagccgagtgccaccatcgataccatcgcttcatgcccgccaaccgtggcgtaaatcatcgggttactgattttattgcgtcgaaaccacagttcaatgcggcggcgtaccggcccctgatcggccataataaacggcaccgttgaccagtccggcttctctaccgacacctgattacgca

SEQ ID NO: 69 - DNA, 19 bp, Artificial Sequence
  Description of Artificial Sequence: Synthetic primer
aggtaagcgatgccgaact

SEQ ID NO: 70 - DNA, 20 bp, Artificial Sequence
  Description of Artificial Sequence: Synthetic primer
tgcgtaatcaggtgtcggta

SEQ ID NO: 71 - DNA, 2139 bp, Artificial Sequence
  Description of Artificial Sequence: Synthetic polynucleotide
aggtaagcgatgccgaactggcggcgcgtcgtgaagcgcaggacgctcgaggtgacaaagcctggacgccgaaaaatcgtgaacgtcaggtctcctttgccctgcgtgcttatgccagcctggcaaccagcgccgacaaaggcgcggtgcgcgataaatcgaaactggggggttaataatggctgactcgcaacccctgtccggtgctccggaaggtgccgaatatttaagagcagtgctgcgcgcgccggtttacgaggcggcgcaggttacgccgctacaaaaaatggaaaaactgtcgtcgcgtcttgataacgtcattctggtgaagcgcgaagatcgccagccagtgcacagctttaagctgcgcggcgcatacgccatgatggcgggcctgacggaagaacagaaagcgcacggcgtgatcactgcttctgcgggtaaccacgcgcagggcgtcgcgttttcttctgcgcggttaggcgtgaaggccctgatcgttatgccaaccgccaccgccgacatcaaagtcgacgcggtgcgcggcttcggcggcgaagtgctgctccacggcgcgaactttgatgaagcgaaagccaaagcgatcgaactgtcacagcagcaggggttcacctgggtgccgccgttcgaccatccgatggtgattgccgggcaaggcacgctggcgctggaactgctccagcaggacgcccatctcgaccgcgtatttgtgccagtcggcggcggcggtctggctgctggcgtggcggtgctgatcaaacaactgatgccgcaaatcaaagtgatcgccgtagaagcggaagactccgcctgcctgaaagcagcgctggatgcgggtcatccggttgatctgccgcgcgtagggctatttgctgaaggcgtagcggtaaaacgcatcggtgacgaaaccttccgtttatgccaggagtatctcgacgacatcatcaccgtcgatagcgatgcgatctgtgcggcgatgaaggatttattcgaagatgtgcgcgcggtggcggaaccctctggcgcgctggcgctggcgggaatgaaaaaatatatcgccctgcacaacattcgcggcgaacggctggcgcatattctttccggtgccaacgtgaacttccacggcctgcgctacgtctcagaacgctgcgaactgggcgaacagcgtgaagcgttgttggcggtgaccattccggaagaaaaaggcagcttcctcaaattctgccaactgcttggcgggcgttcggtcaccgagttcaactaccgttttgccgatgccaaaaacgcctgcatctttgtcggtgtgcgcctgagccgcggcctcgaagagcgcaaagaaattttgcagatgctcaacgacggcggctacagcgtggttgatctctccgacgacgaaatggcgaagctacacgtgcgctatatggtcggcggacgtccatcgcatccgttgcaggaacgcctctacagcttcgaattcccggaatcaccgggcgcgctgctgcgcttcctcaacacgctgggtacgtactggaacatttctttgttccactatcgcagccatggcaccgactacgggcgcgtactggcggcgttcgaacttggcgaccatgaaccggatttcgaaacccggctgaatgagctgggctacgattgccacgacgaaaccaataacccggcgttcaggttctttttggcgggttagggaaaaatgcctgatagcgcttcgcttatcaggcctacccgcgcgacaacgtcatttgtggttcggcaaaatcttccagaatgcctcaattagcggctcatgtagccgctttttctgcgcacacacgcccagctcaaacggcgttttctcatcgctgcgctctaaaatcatcacgcggttacgcaccggttcggggctgttttccagcaccacttccggcaacaatgccacgccacagccgagtgccaccatcgataccatcgcttcatgcccgccaaccgtggcgtaaatcatcgggttactgattttattgcgtcgaaaccacagttcaatgcggcggcgtaccggcccctgatcggccataataaacggcaccgttgaccagtccggcttctctaccgacacctgattacgca

SEQ ID NO: 72 - DNA, 20 bp, Artificial Sequence
  Description of Artificial Sequence: Synthetic primer
attgcgcagacggataaaac

SEQ ID NO: 73 - DNA, 20 bp, Artificial Sequence
  Description of Artificial Sequence: Synthetic primer
gaacaatccaaaccggtgac

SEQ ID NO: 74 - DNA, 1348 bp, Artificial Sequence
  Description of Artificial Sequence: Synthetic polynucleotide
attgcgcagacggataaaacggtgcctgcggaaggaaattaatccgctttgggaaggcatttacaggaggtaacatgaaaaaacgctttatttatcacgatgaaaaatcgaataaattttggtggatagattacgaaggggatagtttagctgtcaactatggcaaggtaggtagtattggtaaattccagacaaaagagttcgataatgaagaacagtgtctgaaagaagccagtaaattgattgccgcaaaaatgaagaaaggctatcaagaagatccaaagtttaacttcatggatcgctactattttgatgatgaagaaattgggttacatgttaaaacgtcacacccaaacttccagtgccattttactgatccactttatatgtgttgctgggatgaagaatctccttttggcagcgatgaaggtgctgatgctctaaacgttcttgaaaatagcctccgtaaagagccggatctggactgtgctgatttccctcaaatgttaattgaaactatgtggggtatgaaatacatcgctatggacagtattcttgaagaggatgttcgtgcgcaattactagtcgatgaaatgagcactatccagagcaatatgattacctacgcaactgcattcggtcagattaaagtcatgggtaaaatctcccataaacttaaaaagatgggactcaatgcactagcgcgtcatcagcttaccgcaaaaattcttcaatggggtgacggtcaggactcaccaatacttcaaaaaatgattgatgaccttacggcgtttcctcacgaaaattaaatactgcatttgtcggcagcaacaactgttaaaaaagtgcgctttgtttatgccggatgcggcgtaaacgccttatccggcctacaaaatcgtgctaattcaatatattgcagaaaccttgtaggcctgataagcgtagcgcatcaggcagttttgcgtttgtcatcagtctccgatgctattaatccttaaatccccgccccctggctaaaatgctcttccccaaacaccccggtagaaaggtagcgatcgccacgatcgcagatgatcgccaccaccaccgcgtcagggttagcttttgccacccgcagtgctccggcaaccgcgccgccggagctgacgccacagaatattccttcccgcaccgccagttcgcgcatggtgttttccgcatcgcgctgatgaatatccagcacctcatccaccagagaagcgttgaaaatccccggcagatattccgtaggccagcggcgaatgccgggaatgctgctgccctcttccggttgcaggccgacaatggtcaccggtttggattgttc

SEQ ID NO: 75 - DNA, 26 bp, Artificial Sequence
  Description of Artificial Sequence: Synthetic primer
ggtcaggtatgatttaaatggtcagt

SEQ ID NO: 76 - DNA, 21 bp, Artificial Sequence
  Description of Artificial Sequence: Synthetic primer
cagtccagttacgctggagtc

SEQ ID NO: 77 - DNA, 2123 bp, Artificial Sequence; identical to SEQ ID NO: 20
  Description of Artificial Sequence: Synthetic polynucleotide

SEQ ID NO: 78 - DNA, 26 bp, Artificial Sequence
  Description of Artificial Sequence: Synthetic primer
ggtcaggtatgatttaaatggtcagt

SEQ ID NO: 79 - DNA, 21 bp, Artificial Sequence
  Description of Artificial Sequence: Synthetic primer
cagtccagttacgctggagtc

SEQ ID NO: 80 - DNA, 1251 bp, Artificial Sequence; identical to SEQ ID NO: 56
  Description of Artificial Sequence: Synthetic polynucleotide

SEQ ID NO: 81 - DNA, 20 bp, Artificial Sequence
  Description of Artificial Sequence: Synthetic primer
ttcttaaggaaagcataaaa

SEQ ID NO: 82 - DNA, 26 bp, Artificial Sequence
  Description of Artificial Sequence: Synthetic primer
gggatctagatcaaatctccctaaac

SEQ ID NO: 83 - DNA, 1017 bp, Artificial Sequence
  Description of Artificial Sequence: Synthetic polynucleotide
ttcttaaggaaagcataaaaaaaacatgcatacaacaatcagaacggttctgtctgcttgcttttaatgccataccaaacgtaccattgagacacttgtttgcacagaggatggcccatgttcacgggaagtattgtcgcgattgttactccgatggatgaaaaaggtaatgtctgtcgggctagcttgaaaaaactgattgattatcatgtcgccagcggtacttcggcgatcgtttctgttggcaccactggcgagtccgctaccttaaatcatgacgaacatgctgatgtggtgatgatgacgctggatctggctgatgggcgcattccggtaattgccgggaccggcgctaacgctactgcggaagccattagcctgacgcagcgcttcaatgacagtggtatcgtcggctgcctgacggtaaccccttactacaatcgtccgtcgcaagaaggtttgtatcagcatttcaaagccatcgctgagcatactgacctgccgcaaattctgtataatgtgccgtcccgtactggctgcgatctgctcccggaaacggtgggccgtctggcgaaagtaaaaaatattatcggaatcaaagaggcaacagggaacttaacgcgtgtaaaccagatcaaagagctggtttcagatgattttgttctgctgagcggcgatgatgcgagcgcgctggacttcatgcaattgggcggtcatggggttatttccgttacggctaacgtcgcagcgcgtgatatggcccagatgtgcaaactggcagcagaagggcattttgccgaggcacgcgttattaatcagcgtctgatgccattacacaacaaactatttgtcgaacccaatccaatcccggtgaaatgggcatgtaaggaactgggtcttgtggcgaccgatacgctgcgcctgccaatgacaccaatcaccgacagtggtcgtgagacggtcagagcggcgcttaagcatgccggtttgctgtaaagtttagggagatttgatccc

SEQ ID NO: 84 - DNA, 19 bp, Artificial Sequence
  Description of Artificial Sequence: Synthetic primer
attaaaagtattttccgag

SEQ ID NO: 85 - DNA, 27 bp, Artificial Sequence
  Description of Artificial Sequence: Synthetic primer
gggatctagagcaaaaaagggaagtgg

SEQ ID NO: 86 - DNA, 2281 bp, Artificial Sequence
  Description of Artificial Sequence: Synthetic polynucleotide
attaaaagtattttccgaggctcctcctttcattttgtcccatgtgttgggaggggccttttttacctggagatatgactatgaacgttattgcaatattgaatcacatgggggtttattttaaagaagaacccatccgtgaacttcatcgcgcgcttgaacgtctgaacttccagattgtttacccgaacgaccgtgacgacttattaaaactgatcgaaaacaatgcgcgtctgtgcggcgttatttttgactgggataaatataatctcgagctgtgcgaagaaattagcaaaatgaacgagaacctgccgttgtacgcgttcgctaatacgtattccactctcgatgtaagcctgaatgacctgcgtttacagattagcttctttgaatatgcgctgggtgctgctgaagatattgctaataagatcaagcagaccactgacgaatatatcaacactattctgcctccgctgactaaagcactgtttaaatatgttcgtgaaggtaaatatactttctgtactcctggtcacatgggcggtactgcattccagaaaagcccggtaggtagcctgttctatgatttctttggtccgaataccatgaaatctgatatttccatttcagtatctgaactgggttctctgctggatcacagtggtccacacaaagaagcagaacagtatatcgctcgcgtctttaacgcagaccgcagctacatggtgaccaacggtacttccactgcgaacaaaattgttggtatgtactctgctccagcaggcagcaccattctgattgaccgtaactgccacaaatcgctgacccacctgatgatgatgagcgatgttacgccaatctatttccgcccgacccgtaacgcttacggtattcttggtggtatcccacagagtgaattccagcacgctaccattgctaagcgcgtgaaagaaacaccaaacgcaacctggccggtacatgctgtaattaccaactctacctatgatggtctgctgtacaacaccgacttcatcaagaaaacactggatgtgaaatccatccactttgactccgcgtgggtgccttacaccaacttctcaccgatttacgaaggtaaatgcggtatgagcggtggccgtgtagaagggaaagtgatttacgaaacccagtccactcacaaactgctggcggcgttctctcaggcttccatgatccacgttaaaggtgacgtaaacgaagaaacctttaacgaagcctacatgatgcacaccaccacttctccgcactacggtatcgtggcgtccactgaaaccgctgcggcgatgatgaaaggcaatgcaggtaagcgtctgatcaacggttctattgaacgtgcgatcaaattccgtaaagagatcaaacgtctgagaacggaatctgatggctggttctttgatgtatggcagccggatcatatcgatacgactgaatgctggccgctgcgttctgacagcacctggcacggcttcaaaaacatcgataacgagcacatgtatcttgacccgatcaaagtcaccctgctgactccggggatggaaaaagacggcaccatgagcgactttggtattccggccagcatcgtggcgaaatacctcgacgaacatggcatcgttgttgagaaaaccggtccgtataacctgctgttcctgttcagcatcggtatcgataagaccaaagcactgagcctgctgcgtgctctgactgactttaaacgtgcgttcgacctgaacctgcgtgtgaaaaacatgctgccgtctctgtatcgtgaagatcctgaattctatgaaaacatgcgtattcaggaactggctcagaatatccacaaactgattgttcaccacaatctgccggatctgatgtatcgcgcatttgaagtgctgccgacgatggtaatgactccgtatgctgcattccagaaagagctgcacggtatgaccgaagaagtttacctcgacgaaatggtaggtcgtattaacgccaatatgatccttccgtacccgccgggagttcctctggtaatgccgggtgaaatgatcaccgaagaaagccgtccggttctggagttcctgcagatgctgtgtgaaatcggcgctcactatccgggctttgaaaccgatattcacggtgcataccgtcaggctgatggccgctataccgttaaggtattgaaagaagaaagcaaaaaataattagctcgtacaagggaagtggcttgccacttcccttttttgctctagatccc

SEQ ID NO: 87 - DNA, 20 bp, Artificial Sequence
  Description of Artificial Sequence: Synthetic primer
acgttgctaaaatgtgaatt

SEQ ID NO: 88 - DNA, 25 bp, Artificial Sequence
  Description of Artificial Sequence: Synthetic primer
gggatctagatattacagacaaaaa

SEQ ID NO: 89 - DNA, 1409 bp, Artificial Sequence
  Description of Artificial Sequence: Synthetic polynucleotide
acgttgctaaaatgtgaattcagcaatgattgcgaggttatcgcaagaaaacgttttcgcgaggttgatgcggtgctttcctggctgttagaatacgccccgtcgcgcctgactgggacaggggcctgtgtctttgctgaatttgatacagagtctgaagcccgccaggtgctagagcaagccccggaatggctcaatggctttgtggcgaaaggcgctaatctttccccattgcacagagccatgctttaagccgggcaagctgagtttcggtgacaacgtcaccttgttccagacgttgcatcgcgctctttaatacaccgcctggaaaggatcatgcctggcccgcacagttttcggcagattctttccaccaatggacgcatgcctgaggttcttctcgtgcctgatatgaagctttttgctggtaacgccaccccggaactagcacaacgtattgccaaccgcctgtacacttcactcggcgacgccgctgtaggtcgctttagcgatggcgaagtcagcgtacaaattaatgaaaatgtacgcggtggtgatattttcatcatccagtccacttgtgcccctactaacgacaacctgatggaattagtcgttatggttgatgccctgcgtcgtgcttccgcaggtcgtatcaccgctgttatcccctactttggctatgcgcgccaggaccgtcgcgtccgttccgctcgtgtaccaatcactgcgaaagtggttgcagacttcctctccagcgtcggtgttgaccgtgtgctgacagtggatctgcacgctgaacagattcagggtttcttcgacgttccggttgataacgtatttggtagcccgatcctgctggaagacatgctgcagctgaatctggataacccaattgtggtttctccggacatcggcggcgttgtgcgtgcccgcgctatcgctaagctgctgaacgataccgatatggcaatcatcgacaaacgtcgtccgcgtgcgaacgtttcacaggtgatgcatatcatcggtgacgttgcaggtcgtgactgcgtactggtcgatgatatgatcgacactggcggtacgctgtgtaaagctgctgaagctctgaaagaacgtggtgctaaacgtgtatttgcgtacgcgactcacccgatcttctctggcaacgcggcgaacaacctgcgtaactctgtaattgatgaagtcgttgtctgcgataccattccgctgagcgatgaaatcaaatcactgccgaacgtgcgtactctgaccctgtcaggtatgctggccgaagcgattcgtcgtatcagcaacgaagaatcgatctctgccatgttcgaacactaatcgaacccggctcaaagacccgctgcggcgggtttttttgtctgtaatatctagatccc

SEQ ID NO: 90 - DNA, 20 bp, Artificial Sequence
  Description of Artificial Sequence: Synthetic primer
ctaaggtgcgcgaaagccac

SEQ ID NO: 91 - DNA, 27 bp, Artificial Sequence
  Description of Artificial Sequence: Synthetic primer
gggatctagatcctggcacagcagttg

SEQ ID NO: 92 - DNA, 3906 bp, Artificial Sequence
  Description of Artificial Sequence: Synthetic polynucleotide
ctaaggtgcgcgaaagccactttttccttcctgagttatccacaaagttatgcacttgcaagagggtcattttcacactatcttgcagtgaatcccaaacataccccctatatatagtgttctaagcagcttcccgtactacaggtagtctgcatgaaactattgcggaaagaattccaaaaacaggtacgacatacatgaatcagaatctgctggtgacaaagcgcgacggtagcacagagcgcatcaatctcgacaaaatccatcgcgttctggattgggcggcagaaggactgcataacgtttcgatttcccaggtcgagctgcgctcccacattcagttttatgacggtatcaagacctctgacatccacgaaaccattatcaaggctgccgcagacctgatctcccgtgatgcgccggattatcagtatctcgccgcgcgcctggcgatcttccacctgcgtaaaaaagcctacggccagtttgagccgcctgcgctgtacgaccacgtggtgaaaatggtcgagatgggcaaatacgataatcatctgctggaagactacacggaagaagagttcaagcagatggacacctttatcgatcacgaccgtgatatgaccttctcttatgctgccgttaagcagctggaaggcaaatatctggtacagaaccgcgtgaccggcgaaatctatgagagcgcccagttcctttatattctagttgccgcgtgcttgttctcgaactacccgcgtgaaacgcgcctgcaatatgtgaagcgtttttacgacgcggtttccacatttaaaatttcgctgccgacgccaatcatgtccggcgtgcgtaccccgactcgtcagttcagctcctgcgtactgatcgagtgcggtgacagcctggattccatcaacgccacctccagcgcgattgttaaatacgtttcccagcgtgccgggatcggcatcaacgccgggcgtattcgtgcgctgggtagcccgattcgcggtggtgaagcgttccataccggctgcattccgttctacaaacatttccagacagcggtgaaatcctgctctcagggcggtgtgcgcggcggtgcggcaacgctgttctacccgatgtggcatctggaagtggaaagcctgctggtgttgaaaaacaaccgtggtgtggaaggcaaccgcgtgcgtcatatggactacggggtacaaatcaacaaactgatgtatacccgtctgctgaaaggtgaagatatcaccctgttcagcccgtccgacgtaccggggctgtacgacgcgttcttcgccgatcaggaagagtttgaacgtctgtataccaaatatgagaaagacgacagcatccgcaagcagcgtgtgaaagccgttgagctgttctcgctgatgatgcaggaacgtgcgtctaccggtcgtatctatattcagaacgttgaccactgcaatacccatagcccgtttgatccggccatcgcgccagtgcgtcagtctaacctgtgcctggagatagccctgccgaccaaaccgctgaacgacgtcaacgacgagaacggtgaaatcgcgctgtgtacgctgtctgctttcaacctgggcgcaattaataacctggatgaactggaagagctggcaattctggcggttcgtgcacttgacgcgctgctggattatcaggattacccgatcccggccgccaaacgtggagcgatgggtcgtcgtacgctgggtattggtgtgatcaacttcgcttactacctggcgaagcacggtaaacgctactccgacggcagcgccaacaacctgacgcataaaaccttcgaagccattcagtattacctgctgaaagcctctaatgagctggcgaaagagcaaggcgcgtgcccgtggtttaacgaaaccacttacgcgaaagggatcctgccgatcgatacctataagaaagatctggataccatcgctaatgagccgctgcattacgactgggaagctctgcgtgagtcaatcaaaacgcacggtctgcgtaactccacgctttctgctctgatgccgtccgagacttcttcgcagatctctaacgccactaacggtattgaaccgccgcgcggttacgtcagcatcaaagcgtcgaaagacggtattttgcgccaggtggtgccggactacgagcacctgcacgacgcctatgagctgctgtgggaaatgccgggtaacgatggttatctgcaactggtgggtatcatgcagaaatttatcgatcagtcgatctctgccaacaccaactacgatccgtcacgcttcccgtcaggaaaagtgccgatgcagcagttgctgaaagacctgctcaccgcctacaaattcggggtcaaaacactgtattatcagaacacccgtgacggcgctgaagacgcacaagacgatctggtgccgtcaatccaggacgatggctgcgaaagcggcgcatgtaagatctgatattgagatgccggatgcggcgtaaacgccttatccggcctacggctcggtttgtaggcctgataagacgcgccagcgtcgcatcaggctccgggtgccggatgcagcgtgaacgccttatccggcctacggctcggatttgtaggcctgataagacgcgccagcgtcgcatcaggcacaggatgcggcgtaaaatgccttatccggcattaaactcccaacaggacacactcatggcatataccaccttttcacagacgaaaaatgatcagctcaaagaaccgatgttctttggtcagccggtcaacgtggctcgctacgatcagcaaaaatatgacatcttcgaaaagctgatcgaaaagcagctctctttcttctggcgtccggaagaagttgacgtctcccgcgaccgtatagattaccaggcgctgccggagcacgaaaaacacatctttatcagcaacctgaaatatcagacgctgctggattccattcagggtcgtagcccgaacgtggcgctattgccgcttatttctattccggaactggaaacctgggtcgaaacctgggcgttctcagaaacgattcattcccgttcctatactcatatcattcgtaatatcgttaacgatccgtctgttgtgtttgacgatatcgtcaccaacgagcagatccagaaacgtgcggaagggatctccagctattacgatgagctgatcgaaatgaccagctactggcatctgctgggcgaaggtacccacaccgttaacggtaaaactgtgaccgttagcctgcgcgagctgaagaaaaaactgtatctctgcctgatgagcgttaacgcgctggaagcgattcgtttctacgtcagctttgcttgttccttcgcatttgcagaacgcgaattgatggaaggcaacgccaaaattattcgcctgattgcccgcgacgaagccctgcacctgaccggcacccagcatatgctgaatctgctgcgcagcggcgcggacgatcctgagatggcggaaattgccgaagagtgtaagcaggagtgctatgacctgtttgttcaggcagctcaacaggagaaagactgggcggattatctgttccgcgacggttcgatgattggtctgaataaagacattctctgccagtacgttgaatacatcaccaatatccgtatgcaggcagtcggtttggatctgccgttccagacgcgctccaacccgatcccgtggatcaacacttggctggtgtctgataacgtgcaggttgctccgcaggaagtggaagtcagttcttatctggtcgggcagattgactcggaagtggacaccgacgatttgagtaacttccagctctgatggcccgcgttaccctgcgcatcactggcacacaactgctgtgccaggatctagatccc

SEQ ID NO: 93 - DNA, 19 bp, Artificial Sequence
  Description of Artificial Sequence: Synthetic primer
atgataataaatacgcgtc

SEQ ID NO: 94 - DNA, 27 bp, Artificial Sequence
  Description of Artificial Sequence: Synthetic primer
gggatctagatcaccacaaattatttg

SEQ ID NO: 95 - DNA, 4076 bp, Artificial Sequence
  Description of Artificial Sequence: Synthetic polynucleotide
atgataataaatacgcgtctttgaccccgaagcctgtcttcggggtttctttttgcctggtgaatcacaaaaatccccctaccccgtcacgctcatatccagggtaatttcgaccactatttgctatatattgtgtggttgaatcttttttcaactacatctagtatctctgtatcaacagagagacaacccgacgcgtatcatcgcgccgtatcttcattttaaacggaaatacgaatcatgcgcattactatttacactcgtaacgattgcgttcagtgccacgccaccaaacgggcgatggaaaaccggggctttgattttgaaatgattaatgtcgatcgcgttcctgaagcggcagaagcgttgcgtgctcagggctttcgtcagttgccggtagtgattgctggcgatcttagctggtctggtttccgtccggacatgattaaccgtctgcatccagcgccacacgcggccagtgcatgagccagctcgtctacttctccagcagctccgaaaacacgcagcgttttatcgaacgtttaggtctgcccgcggtgcgcatcccgctcaatgagcgggaacggattcaggtagacgagccttacatcctgatcgtgccctcttacggcggcggcggtacggctggcgcggtgccacgacaggtaattcgctttttaaacgacgagcacaaccgggcgttgcttcgcggcgttattgcttctggtaatcgcaactttggtgaggcgtatggccgcgccggagatgtgattgcccggaaatgcggcgtgccgtggctgtaccgttttgaactcatgggtacgcaaagcgatatcgaaaacgttcgtaaaggagtaaccgaattttggcaacgacaaccgcagaatgcctgacgcaggaaacgatggattaccacgcgctgaatgcgatgcttaacctctacgatagcgcaggtcgcattcagttcgataaagaccgccaggccgttgacgcctttattgcgacgcatgtgcgtccgaacagtgtgaccttcagtagccagcagcagcgcctgaactggctggtcaacgaaggttactatgatgaaagcgttcttaatcgctactctcgcgactttgtcattacgctgtttacccacgcacacaccagcggttttcgtttccagacattcctcggggcatggaagttttacaccagctatacgttgaagacattcgacggtaaacgttatctggaagattttgccgatcgagtaacgatggtggcgctgacgctggcacaaggcgatgagacgctggcgttgcaactgaccgatgaaatgctgtcaggacgctttcagccagccacgccaacattcctcaactgcggtaagcagcagcgcggcgaactggtttcctgttttttgctgcgtattgaagacaatatggagtcgattggtcgggcggtaaattccgcactgcagctgtcgaaacgcggcggcggcgtagcatttttgctgtcgaatctgcgagaagcgggcgcgccaattaaacgtattgaaaatcaatcttctggcgtaattccggtgatgaaaatgctggaagacgcattttcctatgccaaccaactcggcgctcgtcagggggctggtgcagtctatttacatgctcatcatcccgatattctgcgttttctcgacacgaaacgggaaaatgccgacgaaaaaatccgcattaaaacactgtcgcttggcgtggtgatcccggatatcactttccatctggcaaaagagaatgcgcagatggcgctgttttcgccttatgacgtagagcgagtttatggcaagccgtttgccgatgtggccatcagccaacactatgacgaactggttgccgatgaacgcattcgcaaaaaatacctcaacgcccgtgatttcttccagcgactggcagaaatccagtttgagtccggctatccctacatcatgtatgaagacacggtaaaccgtgctaaccctatcgccgggcgcataaatatgagtaatctctgctcagaaattttgcaggttaacagcgcctcagagtatgacgagaatctcgactatacccgcacaggccatgatatttcctgcaatttaggttcgttgaatattgcgcacaccatggattcccccgattttgcccgcacggtagagactgccgtgcgcggtttaacggcagtatcagatatgagtcatatccgcagcgtgccgtccatcgaagccggaaatgccgcctcgcacgccatcggactggggcagatgaatttacacggctatctggcgcgagaaggcatcgcttatggttcgccggaagcactggatttcaccaatctctatttctatgccatcacctggcatgcactgcgtacctcgatgttgctggcacgcgaacgcggtgaaaccttcgccgggttcaaacagtcacgctatgccagtggtgaatattttagccaatatctgcaagggaactggcagccgaaaacggcgaaagttggcgaactgtttacccgtagcggtattacgttacctacccgtgagatgtgggcgcagctgcgcgacgacgtgatgcgctacggcatatacaaccagaatcttcaggcggtgccgccaaccggttctatctcttatatcaaccatgctacgtcgagtattcatccgattgtggcgaaagtagagatacgcaaagagggcaaaacaggacgcgtttactaccctgccccgtttatgactaacgagaatctggcgctgtatcaggacgcttacgaaattggcgcagaaaagatcatcgacacctacgcggaagcgactcgccatgtcgatcaggggctgtcgctgacgctttttttccccgataccgccaccactcgcgatatcaacaaagcgcagatttacgcctggcgcaagggtatcaaaacgctctattacatccgcctgcgtcagatggcgctggaaggcactgaaattgaaggctgcgtctcctgtgcactttaaggaatatctatgaaactctcacgtatcagcgccatcaactggaacaagatatctgacgataaagatctggaggtgtggaatcgcctgaccagcaatttctggctaccagaaaaggtgccgctgtcgaacgatattcctgcctggcagacattaactgtcgtagaacaacaactgacgatgcgcgtttttactggcctgacgctgctcgacacgctgcaaaatgttatcggcgcgccttctctgatgcccgatgcactcacgcctcatgaagaagcggtattatcgaatatcagctttatggaagcggttcatgcccgctcttacagttcgattttctcgacgctatgccagaccaaagatgtcgatgccgcctacgcctggagtgaagaaaacgcaccgttgcagcgaaaagctcagattattcagcaacattatcgcggtgatgatccgctgaaaaagaaaatcgccagtgtgtttcttgaatcttttttgttctattccggtttctggctgccgatgtatttttccagccgcggaaagctgaccaataccgcggacctgatccgtctgattatccgcgatgaagcagtccacggttactacataggctataaatatcagaaaaacatggaaaagatatctctgggacaacgtgaagagttgaagagtttcgccttcgatttgttgctggaactctacgacaacgagttgcaatacaccgatgagctgtacgccgaaaccccgtgggctgacgatgtgaaagcgtttctctgttacaacgccaataaggctttgatgaatctgggctacgaaccgttatttcccgcagaaatggcggaagtgaatccggcaatcctcgccgcgctttcgccgaatgccgatgaaaatcacgatttcttttccggttcaggctcctcttatgtgatggggaaagcggttgaaacagaagatgaagactggaatttctgagggtgttattttcaaaaatatcactacccgcagcagggaaataattcccgccaaatagctttttatcacgcaaataatttgtggtgatctagatccc

SEQ ID NO: 96 - DNA, 20 bp, Artificial Sequence
  Description of Artificial Sequence: Synthetic primer
caatatgacgtaagttaacg

SEQ ID NO: 97 - DNA, 28 bp, Artificial Sequence
  Description of Artificial Sequence: Synthetic primer
gggatctagacgctggtacgtcgtcatt

SEQ ID NO: 98 - DNA, 1496 bp, Artificial Sequence
  Description of Artificial Sequence: Synthetic polynucleotide
caatatgacgtaagttaacggcggccattagcgctctctcgcaatccggtaatccatatcatttttgcatagactcgacataaatcgatattttttattctttttatgatgtggcgtaatcataaaaaagcacttatctggagtttgttatgccacattcactgttcagcaccgataccgatctcaccgccgaaaatctgctgcgtttgcccgctgaatttggctgcccggtgtgggtctacgatgcgcaaattattcgtcggcagattgcagcgctgaaacagtttgatgtggtgcgctttgcacagaaagcctgttccaatattcatattttgcgcttaatgcgtgagcagggcgtgaaagtggattccgtctcgttaggcgaaatagagcgtgcgttggcggcgggttacaatccgcaaacgcaccccgatgatattgtttttacggcagatgttatcgatcaggcgacgcttgaacgcgtcagtgaattgcaaattccggtgaatgcgggttctgttgatatgctcgaccaactgggccaggtttcgccagggcatcgggtatggctgcgcgttaatccggggtttggtcacggacatagccaaaaaaccaataccggtggcgaaaacagcaagcacggtatctggtacaccgatctgcccgccgcactggacgtgatacaacgtcatcatctgcagctggtcggcattcacatgcacattggttctggcgttgattatgcccatctggaacaggtgtgtggtgctatggtgcgtcaggtcatcgaattcggtcaggatttacaggctatttctgcgggcggtgggctttctgttccttatcaacagggtgaagaggcggttgataccgaacattattatggtctgtggaatgccgcgcgtgagcaaatcgcccgccatttgggccaccctgtgaaactggaaattgaaccgggtcgcttcctggtagcgcagtctggcgtattaattactcaggtgcggagcgtcaaacaaatggggagccgccactttgtgctggttgatgccgggttcaacgatctgatgcgcccggcaatgtacggtagttaccaccatatcagtgccctggcagctgatggtcgttctctggaacacgcgccaacggtggaaaccgtcgtcgccggaccgttatgtgaatcgggcgatgtctttacccagcaggaagggggaaatgttgaaacccgcgccttgccggaagtgaaggcaggtgattatctggtactgcatgatacaggggcatatggcgcatcaatgtcatccaactacaatagccgtccgctgttaccagaagttctgtttgataatggtcaggcgcggttgattcgccgtcgccagaccatcgaagaattactggcgctggaattgctttaactgcggttagtcgctggttgcatgatgacttgcctccagcgacggagttgacactgaatgacgacgtaccagcgtctagatccc

SEQ ID NO: 99 - DNA, 26 bp, Artificial Sequence
  Description of Artificial Sequence: Synthetic primer
ggtcaggtatgatttaaatggtcagt

SEQ ID NO: 100 - DNA, 21 bp, Artificial Sequence
  Description of Artificial Sequence: Synthetic primer
cagtccagttacgctggagtc

SEQ ID NO: 101 - DNA, 2123 bp, Artificial Sequence; identical to SEQ ID NO: 20
  Description of Artificial Sequence: Synthetic polynucleotide

SEQ ID NO: 102 - DNA, 24 bp, Artificial Sequence
  Description of Artificial Sequence: Synthetic primer
gctgtgcaggtcgtaaatcactgc

SEQ ID NO: 103 - DNA, 20 bp, Artificial Sequence
  Description of Artificial Sequence: Synthetic primer
gccaccctccgggccgttgc

SEQ ID NO: 104 - DNA, 1903 bp, Artificial Sequence
  Description of Artificial Sequence: Synthetic polynucleotide
gctgtgcaggtcgtaaatcactgcataattcgtgtcgctcaaggcgcctcccgttctggatatgttttttgcgccgacatcataacgggttctggcaaatattctgaaatgagctgttgacaattaatcatcggctcgtataatgtgtggaattgtgagcggataacaatttcacacaggaaacagaattccctgagacttgtaatgaacagaactgacgaactccgtactgcgcgtattgagagcctggtaacgcccgccgaactcgcgctacggtatcccgtaacgcctggcgtcgccacccatgtcaccgactcccgccgcagaattgaaaaaatactgaatggtgaagataagcgactgttggtcattattggcccctgctcgatccacgatctcaccgctgcaatggagtacgccacccgtctgcagtcgctgcgcaaccagtaccagtcacggctggaaatcgtaatgcgcacctattttgaaaaaccacgaactgttgtcggctggaaaggactaatctccgatccagatttaaacggcagctatcgggtaaatcacggtctggagctggcgcgcaaattacttttacaggtaaatgagctgggcgtcccaaccgcgaccgagttcctcgatatggtgacctgtcagtttattgctgatttaatcagttggggcgcgattggcgcacgtactaccgaaagtcagatccaccgcgaaatggcttcggcactctcctgtccggtaggttttaaaaatggtaccgatggcaatacgcggattgctgtggatgctatccgcgcagcccgcgccagccatatgttcctctcgccagacaaaaatggtcagatgaccatctatcagaccagcggcaacccgtatggccacattattatgcgtggcggcaaaaaaccgaattatcatgccgatgatatcgccgcagcctgcgatacgctgcacgagtttgatttacctgaacatctggtggtggatttcagccacggtaactgccagaagcagcaccgtcgccagttagaagtttgtgaggatatttgtcagcaaatccgcaatggctctacggcgattgctggaattatggcggaaagtttcctgcgcgaaggaacgcaaaaaatcgtcggcagtcagccgctcacttacggtcaatccattaccgacccgtgtctgggctgggaggataccgaacgcctggtcgaaaaactcgcctctgcggtagatacccgcttctgaatgcgtgcccattcctgacggaatgggcatttctgcgcaacttgttgtcttctcaacaaattactgcttgctctggtcagccataatattgataataagaatcattgttatatcaattattattaatttttatgcgttatacggatagcagaaaactcacgcctgaaacggatgccaatcacaagaccgcttccccgcagcctattcggcgaattcttgaagacgaaagggcctcgtgatacgcctatttttataggttaatgtcatgataataatggtttcttaggggatccgtcgacctgcagccaagcttggctgttttggcggatgagagaagattttcagcctgatacagattaaatcagaacgcagaagcggtctgataaaacagaatttgcctggcggcagtagcgcggtggtcccacctgaccccatgccgaactcagaagtgaaacgccgtagcgccgatggtagtgtggggtctccccatgcgagagtagggaactgccaggcatcaaataaaacgaaaggctcagtcgaaagaactgggcctttcgttttatctgttgtttgtcggtgaacgctctcctgagtaggacaaatccgccgggagcggatttgaacgttgcgaagcaacggcccggagggtggc

SEQ ID NO: 105 - DNA, 25 bp, Artificial Sequence
  Description of Artificial Sequence: Synthetic primer
ggacccgggatcaagtgaagaaaac

SEQ ID NO: 106 - DNA, 24 bp, Artificial Sequence
  Description of Artificial Sequence: Synthetic primer
ggtaacccgggtggtgtcgaacgt

SEQ ID NO: 107 - DNA, 1377 bp, Artificial Sequence
  Description of Artificial Sequence: Synthetic polynucleotide
ggacccgggatcaagtgaagaaaaccgatcttgatgctgaactgcaacaacagttccttgaagagttcgaggcaggtttgtacggttatacttatcttgaagatgagtaagtcctgtgttacttgaatccgcttaatttagcggtgataatccgccacaatttattgtgacaaatccaacccttcctcgtcgggcctaacgacgcggaagggtttttttatatcgactttgtaataggagtccatccatgagcaccttaggtcatcaatacgataactcactggtttccaatgcctttggttttttacgcctgccgatgaacttccagccgtatgacagcgatgcagactgggtgattactggcgtgccgttcgatatggccacttctggtcgtgcgggtggtcgccacggtccggcagcgatccgtcaggtttcgacgaatctggcctgggaacacaaccgcttcccgtggaatttcgacatgcgtgagcgtctgaacgtcgtggactgcggcgatctggtatatgcctttggcgatgcccgtgagatgagcgaaaagctgcaggcgcacgccgagaagctgctggctgccggtaagcgtatgctctctttcggtggtgaccactttgttacgctgccgctgctgcgtgctcatgcgaagcatttcggcaaaatggcgctggtacactttgacgcccacaccgatacctatgcgaacggttgtgaatttgaccacggcactatgttctataccgcgccgaaagaaggtctgatcgacccgaatcattccgtgcagattggtattcgtaccgagtttgataaagacaacggctttaccgtgctggacgcctgccaggtgaacgatcgcagcgtggatgacgttatcgcccaagtgaaacagattgtgggtgatatgccggtttacctgacttttgatatcgactgcctggatcctgcttttgcaccaggcaccggtacgccagtgattggcggcctgacctccgatcgcgctattaaactggtacgcggcctgaaagatctcaacattgttgggatggacgtagtggaagtggctccggcatacgatcagtcggaaatcactgctctggcagcggcaacgctggcgctggaaatgctgtatattcaggcggcgaaaaagggcgagtaagcaccagatgcgatgcgcacgggtaaaacgtgccattaatgtcggatgcggcgtgaacgccttatccgacctacgttcggcacccgtaggccggataagatgcgccagcatcgcatccggcaatgcgcacaaggtaacaaatgtgccattcatgtcagatgcggcgtgaacgccttatctgacctacgttcgacaccacccgggttacc

SEQ ID NO: 108 - DNA, 24 bp, Artificial Sequence
  Description of Artificial Sequence: Synthetic primer
gctgtgcaggtcgtaaatcactgc

SEQ ID NO: 109 - DNA, 20 bp, Artificial Sequence
  Description of Artificial Sequence: Synthetic primer
gccaccctccgggccgttgc

SEQ ID NO: 110 - DNA, 2982 bp, Artificial Sequence
  Description of Artificial Sequence: Synthetic polynucleotide
gctgtgcaggtcgtaaatcactgcataattcgtgtcgctcaaggcgcactcccgttctggataatgttttttgcgccgacatcataacggttctggcaaatattctgaaatgagctgttgacaattaatcatcggctcgtataatgtgtggaattgtgagcggataacaatttcacacaggaaacagaattcccggggatgaataaacttgccgccttccctaaattcaaaatccataggatttacatataattagaggaagaaaaaatgacaatattgaatcacaccctcggtttccctcgcgttggcctgcgtcgcgagctgaaaaaagcgcaagaaagttattgggcggggaactccacgcgtgaagaactgctggcggtagggcgtgaattgcgtgctcgtcactgggatcaacaaaagcaagcgggtatcgacctgctgccggtgggcgattttgcctggtacgatcatgtactgaccaccagtctgctgctgggtaacgttccggcgcgtcatcagaacaaagatggttcggtagatatcgacaccctgttccgtattggtcgtggacgtgcgccgactggcgaacctgcggcggcagcggaaatgaccaaatggtttaacaccaactatcactacatggtgccggagttcgttaaaggccaacagttcaaactgacctggacgcagctgctggacgaagtggacgaggcgctggcgctgggccacaaggtgaaacctgtgctgctggggccggttacctggctgtggctggggaaagtgaaaggtgaacaatttgaccgcctgagcctgctgaacgacattctgccggtttatcagcaagtgctggcagaactggcgaaacgcggcatcgagtgggtacagattgatgaacccgcgctggtactggaactaccacaggcgtggctggacgcatacaaacccgcttacgacgcgctccagggacaggtgaaactgctgctgaccacctattttgaaggcgtaacgccaaatctcgacacgattactgcgctgcctgttcagggtctgcatgttgacctcgtacatggtaaagatgacgttgctgaactgcacaagcgcctgccttctgactggttgctgtctgcgggtctgatcaatggtcgtaacgtctggcgcgccgatcttaccgagaaatatgcgcaaattaaggacattgtcggcaaacgtgatttgtgggtggcatcttcctgctcgttgctgcacagccccatcgacctgagcgtggaaacgcgtcttgatgcagaagtgaaaagctggtttgccttcgccctacaaaaatgccatgaactggcactgctgcgcgatgcgctgaacagtggtgacacggcagctctggcagagtggagcgccccgattcaggcacgtcgtcactctacccgcgtacataatccggcggtagaaaagcgtctggcggcgatcaccgcccaggacagccagcgtgcgaatgtctatgaagtgcgtgctgaagcccagcgtgcgcgttttaaactgccagcgtggccgaccaccacgattggttccttcccgcaaaccacggaaattcgtaccctgcgtctggatttcaaaaagggcaatctcgacgccaacaactaccgcacgggcattgcggaacatatcaagcaggccattgttgagcaggaacgtttgggactggatgtgctggtacatggcgaggccgagcgtaatgacatggtggaatactttggcgagcacctcgacggatttgtctttacgcaaaacggttgggtacagagctacggttcccgctgcgtgaagccaccgattgtcattggtgacattagccgcccggcaccgattaccgtggagtgggcgaagtatgcgcaatcgctgaccgacaaaccggtgaaagggatgctgacggggccggtgaccatactctgctggtcgttcccgcgtgaagatgtcagccgtgaaaccatcgccaaacagattgcgctggcgctgcgtgatgaagtggccgatctggaagccgctggaattggcatcatccagattgacgaaccggcgctgcgcgaaggtttaccgctgcgtcgtagcgactgggatgcgtatctccagtggggcgtagaggccttccgtatcaacgccgccgtggcgaaagatgacacacaaatccacactcacatgtgttatgcggagttcaacgacatcatggattcgattgcggcgctggacgcagacgtcatcaccatcgaaacctcgcgttccgacatggagttgctggagtcgtttgaagagtttgattatccaaatgaaatcggtcctggcgtctatgacattcactcgccaaacgtaccgagcgtggaatggattgaagccttgctgaagaaagcggcaaaacgcattccggcagagcgcctgtgggtcaacccggactgtggcctgaaaacgcgcggctggccagaaacccgcgcggcactggcgaacatggtgcaggcggcgcagaacttgcgtcgggggtaaaatccaaaccgggtggtaataccacccggtcttttctcattacagcgacttcttcccaccatactgcttaaaccattccagcatacgctgccagccatcttctgcagccaagcttggctgttttggcggatgagagaagattttcagcctgatacagattaaatcagaacgcagaagcggtctgataaaacagaatttgcctggcggcagtagcgcggtggtcccacctgaccccatgccgaactcagaagtgaaacgccgtagcgccgatggtagtgtggggtctccccatgcgagagtagggaactgccaggcatcaaataaaacgaaaggctcagtcgaaagactgggcctttcgttttatctgttgtttgtcggtgaacgctctcctgagtaggacaaatccgccgggagcggatttgaacgttgcgaagcaacggcccggagggtggc

SEQ ID NO: 111 - DNA, 26 bp, Artificial Sequence
  Description of Artificial Sequence: Synthetic primer
ggtcaggtatgatttaaatggtcagt

SEQ ID NO: 112 - DNA, 21 bp, Artificial Sequence
  Description of Artificial Sequence: Synthetic primer
cagtccagttacgctggagtc

SEQ ID NO: 113 - DNA, 1251 bp, Artificial Sequence; identical to SEQ ID NO: 56
  Description of Artificial Sequence: Synthetic polynucleotide

SEQ ID NO: 114 - DNA, 26 bp, Artificial Sequence
  Description of Artificial Sequence: Synthetic primer
ggtcaggtatgatttaaatggtcagt

SEQ ID NO: 115 - DNA, 21 bp, Artificial Sequence
  Description of Artificial Sequence: Synthetic primer
cagtccagttacgctggagtc

SEQ ID NO: 116 - DNA, 2123 bp, Artificial Sequence; identical to SEQ ID NO: 20
  Description of Artificial Sequence: Synthetic polynucleotide

SEQ ID NO: 117 - DNA, 24 bp, Artificial Sequence
  Description of Artificial Sequence: Synthetic primer
gctgtgcaggtcgtaaatcactgc

SEQ ID NO: 118 - DNA, 20 bp, Artificial Sequence
  Description of Artificial Sequence: Synthetic primer
gccaccctccgggccgttgc

SEQ ID NO: 119 - DNA, 1903 bp, Artificial Sequence; identical to SEQ ID NO: 104
  Description of Artificial Sequence: Synthetic polynucleotide

SEQ ID NO: 120 - DNA, 25 bp, Artificial Sequence
  Description of Artificial Sequence: Synthetic primer
ggacccgggatcaagtgaagaaaac

SEQ ID NO: 121 - DNA, 24 bp, Artificial Sequence
  Description of Artificial Sequence: Synthetic primer
ggtaacccgggtggtgtcgaacgt

SEQ ID NO: 122 - DNA, 1377 bp, Artificial Sequence; identical to SEQ ID NO: 107
  Description of Artificial Sequence: Synthetic polynucleotide

SEQ ID NO: 123 - DNA, 19 bp, Artificial Sequence
  Description of Artificial Sequence: Synthetic primer
cgcggtatcattgcagcac

SEQ ID NO: 124 - DNA, 31 bp, Artificial Sequence
  Description of Artificial Sequence: Synthetic primer
gcatcggctcttccgcgtcaagtcagcgtaa

SEQ ID NO: 125 - DNA, 21 bp, Artificial Sequence
  Description of Artificial Sequence: Synthetic primer
aacgaattcaagcttgatatc

SEQ ID NO: 126 - DNA, 23 bp, Artificial Sequence
  Description of Artificial Sequence: Synthetic primer
gaattcgttgacgaattctctag

SEQ ID NO: 127 - DNA, 87 bp, Artificial Sequence
  Description of Artificial Sequence: Synthetic primer
aattcgtggaagaaaggggagatgaagccggcattacgcgatttcatcgccattgtgcaggaacgtttggcaagcgtaacggcataa

SEQ ID NO: 128 - DNA, 87 bp, Artificial Sequence
  Description of Artificial Sequence: Synthetic primer
agctttatgccgttacgcttgccaaacgttcctgcacaatggcgatgaaatcgcgtaatgccggcttcatctcccctttcttccacg

SEQ ID NO: 129 - protein, 21 aa, Escherichia coli
MKPALRDFIAIVQERLASVTA

SEQ ID NO: 130 - DNA, 19 bp, Artificial Sequence
  Description of Artificial Sequence: Synthetic primer
aaggtcggtgctcatcaag

SEQ ID NO: 131 - DNA, 17 bp, Artificial Sequence
  Description of Artificial Sequence: Synthetic primer
ctggttgctggataacc

SEQ ID NO: 132 - DNA, 20 bp, Artificial Sequence
  Description of Artificial Sequence: Synthetic primer
atatgaatattggaacaggc

SEQ ID NO: 133 - DNA, 22 bp, Artificial Sequence
  Description of Artificial Sequence: Synthetic primer
acgcgttacaccatggaacagg

SEQ ID NO: 134 - DNA, 19 bp, Artificial Sequence
  Description of Artificial Sequence: Synthetic primer
ctgacggcacgactcggga

SEQ ID NO: 135 - DNA, 21 bp, Artificial Sequence
  Description of Artificial Sequence: Synthetic primer
ctgccgatctgccgttcgccc

SEQ ID NO: 136 - DNA, 20 bp, Artificial Sequence
  Description of Artificial Sequence: Synthetic primer
agcagcttataacgccggac

SEQ ID NO: 137 - DNA, 21 bp, Artificial Sequence
  Description of Artificial Sequence: Synthetic primer
tggtcccgtgatgtcgcgtta

SEQ ID NO: 138 - DNA, 20 bp, Artificial Sequence
  Description of Artificial Sequence: Synthetic primer
gatggtggcctgtttacgcg

SEQ ID NO: 139 - DNA, 20 bp, Artificial Sequence
  Description of Artificial Sequence: Synthetic primer
gatcgctttactttgcgatg

SEQ ID NO: 140 - DNA, 19 bp, Artificial Sequence
  Description of Artificial Sequence: Synthetic primer
gattttgactgtttcttga

SEQ ID NO: 141 - DNA, 20 bp, Artificial Sequence
  Description of Artificial Sequence: Synthetic primer
cgaggcaaccacgcgcgcta

SEQ ID NO: 142 - DNA, 30 bp, Artificial Sequence
  Description of Artificial Sequence: Synthetic primer
gggaactagtctttgtaataggagtccatc

SEQ ID NO: 143 - DNA, 27 bp, Artificial Sequence
  Description of Artificial Sequence: Synthetic primer
gggaagcatgcgcatcgcatctggtgc

SEQ ID NO: 144 - DNA, 979 bp, Artificial Sequence
  Description of Artificial Sequence: Synthetic polynucleotide
gggaactagtctttgtaataggagtccatccatgagcaccttaggtcatcaatacgataactcactggtttccaatgcctttggttttttacgcctgccgatgaacttccagccgtatgacagcgatgcagactgggtgattactggcgtgccgttcgatatggccacttctggtcgtgcgggtggtcgccacggtccggcagcgatccgtcaggtttcgacgaatctggcctgggaacacaaccgcttcccgtggaatttcgacatgcgtgagcgtctgaacgtcgtggactgcggcgatctggtatatgcctttggcgatgcccgtgagatgagcgaaaagctgcaggcgcacgccgagaagctgctggctgccggtaagcgtatgctctctttcggtggtgaccactttgttacgctgccgctgctgcgtgctcatgcgaagcatttcggcaaaatggcgctggtacactttgacgcccacaccgatacctatgcgaacggttgtgaatttgaccacggcactatgttctataccgcgccgaaagaaggtctgatcgacccgaatcattccgtgcagattggtattcgtaccgagtttgataaagacaacggctttaccgtgctggacgcctgccaggtgaacgatcgcagcgtggatgacgttatcgcccaagtgaaacagattgtgggtgatatgccggtttacctgacttttgatatcgactgcctggatcctgcttttgcaccaggcaccggtacgccagtgattggcggcctgacctccgatcgcgctattaaactggtacgcggcctgaaagatctcaacattgttgggatggacgtagtggaagtggctccggcatacgatcagtcggaaatcactgctctggcagcggcaacgctggcgctggaaatgctgtatattcaggcggcgaaaaagggcgagtaagcaccagatgcgatgcgcatgcttccc

SEQ ID NO: 145 - DNA, 29 bp, Artificial Sequence
  Description of Artificial Sequence: Synthetic primer
gggaactagtaggatttacatataattag

SEQ ID NO: 146 - DNA, 29 bp, Artificial Sequence
  Description of Artificial Sequence: Synthetic primer
gggaagcatgcggtattaccacccggttt

SEQ ID NO: 147 - DNA, 2336 bp, Artificial Sequence
  Description of Artificial Sequence: Synthetic polynucleotide
gggaactagtaggatttacatataattagaggaagaaaaaatgacaatattgaatcacaccctcggtttccctcgcgttggcctgcgtcgcgagctgaaaaaagcgcaagaaagttattgggcggggaactccacgcgtgaagaactgctggcggtagggcgtgaattgcgtgctcgtcactgggatcaacaaaagcaagcgggtatcgacctgctgccggtgggcgattttgcctggtacgatcatgtactgaccaccagtctgctgctgggtaacgttccggcgcgtcatcagaacaaagatggttcggtagatatcgacaccctgttccgtattggtcgtggacgtgcgccgactggcgaacctgcggcggcagcggaaatgaccaaatggtttaacaccaactatcactacatggtgccggagttcgttaaaggccaacagttcaaactgacctggacgcagctgctggacgaagtggacgaggcgctggcgctgggccacaaggtgaaacctgtgctgctggggccggttacctggctgtggctggggaaagtgaaaggtgaacaatttgaccgcctgagcctgctgaacgacattctgccggtttatcagcaagtgctggcagaactggcgaaacgcggcatcgagtgggtacagattgatgaacccgcgctggtactggaactaccacaggcgtggctggacgcatacaaacccgcttacgacgcgctccagggacaggtgaaactgctgctgaccacctattttgaaggcgtaacgccaaatctcgacacgattactgcgctgcctgttcagggtctgcatgttgacctcgtacatggtaaagatgacgttgctgaactgcacaagcgcctgccttctgactggttgctgtctgcgggtctgatcaatggtcgtaacgtctggcgcgccgatcttaccgagaaatatgcgcaaattaaggacattgtcggcaaacgtgatttgtgggtggcatcttcctgctcgttgctgcacagccccatcgacctgagcgtggaaacgcgtcttgatgcagaagtgaaaagctggtttgccttcgccctacaaaaatgccatgaactggcactgctgcgcgatgcgctgaacagtggtgacacggcagctctggcagagtggagcgccccgattcaggcacgtcgtcactctacccgcgtacataatccggcggtagaaaagcgtctggcggcgatcaccgcccaggacagccagcgtgcgaatgtctatgaagtgcgtgctgaagcccagcgtgcgcgttttaaactgccagcgtggccgaccaccacgattggttccttcccgcaaaccacggaaattcgtaccctgcgtctggatttcaaaaagggcaatctcgacgccaacaactaccgcacgggcattgcggaacatatcaagcaggccattgttgagcaggaacgtttgggactggatgtgctggtacatggcgaggccgagcgtaatgacatggtggaatactttggcgagcacctcgacggatttgtctttacgcaaaacggttgggtacagagctacggttcccgctgcgtgaagccaccgattgtcattggtgacattagccgcccggcaccgattaccgtggagtgggcgaagtatgcgcaatcgctgaccgacaaaccggtgaaagggatgctgacggggccggtgaccatactctgctggtcgttcccgcgtgaagatgtcagccgtgaaaccatcgccaaacagattgcgctggcgctgcgtgatgaagtggccgatctggaagccgctggaattggcatcatccagattgacgaaccggcgctgcgcgaaggtttaccgctgcgtcgtagcgactgggatgcgtatctccagtggggcgtagaggccttccgtatcaacgccgccgtggcgaaagatgacacacaaatccacactcacatgtgttattgcgagttcaacgacatcatggattcgattgcggcgctggacgcagacgtcatcaccatcgaaacctcgcgttccgacatggagttgctggagtcgtttgaagagtttgattatccaaatgaaatcggtcctggcgtctatgacattcactcgccaaacgtaccgagcgtggaatggattgaagccttgctgaagaaagcggcaaaacgcattccggcagagcgcctgtgggtcaacccggactgtggcctgaaaacgcgcggctggccagaaacccgcgcggcactggcgaacatggtgcaggcggcgcagaacttgcgtcgggggtaaaatccaaaccgggtggtaataccgcatgcttccc

SEQ ID NO: 148 - DNA, 27 bp, Artificial Sequence
  Description of Artificial Sequence: Synthetic primer
ggaaggatccatgtccggtacgggtcg

SEQ ID NO: 149 - DNA, 26 bp, Artificial Sequence
  Description of Artificial Sequence: Synthetic primer
gggattagacggtaatcgcacgaccg

SEQ ID NO: 150 - DNA, 7794 bp, Artificial Sequence
  Description of Artificial Sequence: Synthetic polynucleotide
ggtggcggtacttgggtcgatatcaaagtgcatcacttcttcccgtatgcccaactttgtatagagagccactgcgggatcgtcaccgtaatctgcttgcacgtagatcacataagcaccaagcgcgttggcctcatgcttgaggagattgatgagcgcggtggcaatgccctgcctccggtgctcgccggagactgcgagatcatagatatagatctcactacgcggctgctcaaacttgggcagaacgtaagccgcgagagcgccaacaaccgcttcttggtcgaaggcagcaagcgcgatgaatgtcttactacggagcaagttcccgaggtaatcggagtccggctgatgttgggagtaggtggctacgtcaccgaactcacgaccgaaaagatcaagagcagcccgcatggatttgacttggtcagggccgagcctacatgtgcgaatgatgcccatacttgagccacctaactttgttttagggcgactgccctgctgcgtaacatcgttgctgctccataacatcaaacatcgacccacggcgtaacgcgcttgctgcttggatgcccgaggcatagactgtacaaaaaaacagtcataacaagccatgaaaaccgccactgcgccgttaccaccgctgcgttcggtcaaggttctggaccagttgcgtgagcgcatttttttttcctcctcggcgtttacgccccgccctgccactcatcgcagtactgttgtaattcattaagcattctgccgacatggaagccatcacagacggcatgatgaacctgaatcgccagcggcatcagcaccttgtcgccttgcgtataatatttgcccatagtgaaaacgggggcgaagaagttgtccatattggccacgtttaaatcaaaactggtgaaactcacccagggattggcgctgacgaaaaacatattctcaataaaccctttagggaaataggccaggttttcaccgtaacacgccacatcttgcgaatatatgtgtagaaactgccggaaatcgtcgtggtattcactccagagcgatgaaaacgtttcagtttgctcatggaaaacggtgtaacaagggtgaacactatcccatatcaccagctcaccgtctttcattgccatacggaactccggatgagcattcatcaggcgggcaagaatgtgaataaaggccggataaaacttgtgcttatttttctttacggtctttaaaaaggccgtaatatccagctgaacggtctggttataggtacattgagcaactgactgaaatgcctcaaaatgttctttacgatgccattgggatatatcaacggtggtatatccagtgatttttttctccatttttttttcctcctttagaaaaactcatcgagcatcaaatgaaactgcaatttattcatatcaggattatcaataccatatttttgaaaaagccgtttctgtaatgaaggagaaaactcaccgaggcagttccataggatggcaagatcctggtatcggtctgcgattccgactcgtccaacatcaatacaacctattaatttcccctcgtcaaaaataaggttatcaagtgagaaatcaccatgagtgacgactgaatccggtgagaatggcaaaagtttatgcatttctttccagacttgttcaacaggccagccattacgctcgtcatcaaaatcactcgcatcaaccaaaccgttattcattcgtgattgcgcctgagcgaggcgaaatacgcgatcgctgttaaaaggacaattacaaacaggaatcgagtgcaaccggcgcaggaacactgccagcgcatcaacaatattttcacctgaatcaggatattcttctaatacctggaacgctgtttttccggggatcgcagtggtgagtaaccatgcatcatcaggagtacggataaaatgcttgatggtcggaagtggcataaattccgtcagccagtttagtctgaccatctcatctgtaacatcattggcaacgctacctttgccatgtttcagaaacaactctggcgcatcgggcttcccatacaagcgatagattgtcgcacctgattgcccgacattatcgcgagcccatttatacccatataaatcagcatccatgttggaatttaatcgcggcctcgacgtttcccgttgaatatggctcatttttttttcctcctttaccaatgcttaatcagtgaggcacctatctcagcgatctgtctatttcgttcatccatagttgcctgactccccgtcgtgtagataactacgatacgggagggcttaccatctggccccagcgctgcgatgataccgcgagaaccacgctcaccggctccggatttatcagcaataaaccagccagccggaagggccgagcgcagaagtggtcctgcaactttatccgcctccatccagtctattaattgttgccgggaagctagagtaagtagttcgccagttaatagtttgcgcaacgttgttgccatcgctacaggcatcgtggtgtcacgctcgtcgtttggtatggcttcattcagctccggttcccaacgatcaaggcgagttacatgatcccccatgttgtgcaaaaaagcggttagctccttcggtcctccgatcgttgtcagaagtaagttggccgcagtgttatcactcatggttatggcagcactgcataattctcttactgtcatgccatccgtaagatgcttttctgtgactggtgagtactcaaccaagtcattctgagaatagtgtatgcggcgaccgagttgctcttgcccggcgtcaatacgggataataccgcgccacatagcagaactttaaaagtgctcatcattggaaaacgttcttcggggcgaaaactctcaaggatcttaccgctgttgagatccagttcgatgtaacccactcgtgcacccaactgatcttcagcatcttttactttcaccagcgtttctgggtgagcaaaaacaggaaggcaaaatgccgcaaaaaagggaataagggcgacacggaaatgttgaatactcatattcttcctttttcaatattattgaagcatttatcagggttattgtctcatgagcggatacatatttgaatgtatttagaaaaataaacaaataggggtcagtgttacaaccaattaaccaattctgaacattatcgcgagcccatttatacctgaatatggctcataacaccccttgtttgcctggcggcagtagcgcggtggtcccacctgaccccatgccgaactcagaagtgaaacgccgtagcgccgatggtagtgtggggactccccatgcgagagtagggaactgccaggcatcaaataaaacgaaaggctcagtcgaaagactgggcctttcgcccgggctaattgaggggtgtcgcccttattcgactctatagtgaagttcctattctctagaaagtataggaacttctgaagtggggtttaaactccctctgcccttccctcccgcttcatccttatttttggacaataaactagagaacaatttgaacttgaattggaattcagattcagagcaagagacaagaaacttccctttttcttctccacatattattatttattcgtgtattttcttttaacgatacgatacgatacgacacgatacgatacgacacgctactatacagtgacgtcagattgtactgagagtgcagattgtactgagagtgcaccataaattcccgttttaagagcttggtgagcgctaggagtcactgccaggtatcgtttgaacacggcattagtcagggaagtcataacacagtcctttcccgcaattttctttttctattactcttggcctcctctagtacactctatatttttttatgcctcggtaatgattttcatttttttttttcccctagcggatgactctttttttttcttagcgattggcattatcacataatgaattatacattatataaagtaatgtgatttcttcgaagaatatactaaaaaatgagcaggcaagataaacgaaggcaaagatgacagagcagaaagccctagtaaagcgtattacaaatgaaaccaagattcagattgcgatctctttaaagggtggtcccctagcgatagagcactcgatcttcccagaaaaagaggcagaagcagtagcagaacaggccacacaatcgcaagtgattaacgtccacacaggtatagggtttctggaccatatgatacatgctctggccaagcattccggctggtcgctaatcgttgagtgcattggtgacttacacatagacgaccatcacaccactgaagactgcgggattgctctcggtcaagcttttaaagaggccctactggcgcgtggagtaaaaaggtttggatcaggatttgcgcctttggatgaggcactttccagagcggtggtagatctttcgaacaggccgtacgcagttgtcgaacttggtttgcaaagggagaaagtaggagatctctcttgcgagatgatcccgcattttcttgaaagctttgcagaggctagcagaattaccctccacgttgattgtctgcgaggcaagaatgatcatcaccgtagtgagagtgcgttcaaggctcttgcggttgccataagagaagccacctcgcccaatggtaccaacgatgttccctccaccaaaggtgttcttatgtagtgacaccgattatttaaagctgcagcatacgatatatatacatgtgtatatatgtatacctatgaatgtcagtaagtatgtatacgaacagtatgatactgaagatgacaaggtaatgcatcattctatacgtgtcattctgaacgaggcgcgctttccttttttctttttgctttttctttttttttctcttgaactcgacggatctatgcggtgtgaaataccgcacaggtgtgaaataccgcacagtcatgagatccgataacttcttttctttttttttcttttctctctcccccgttgttgtctcaccatatccgcaatgacaaaaaaaatgatggaagacactaaaggaaaaaattaacgacaaagacagcaccaacagatgtcgttgttccagagctgatgaggggtatcttcgaacacacgaaactttttccttccttcattcacgcacactactctctaatgagcaacggtatacggccttccttccagttacttgaatttgaaataaaaaaagtttgccgctttgctatcaagtataaatagacctgcaattattaatcttttgtttcctcgtcattgttctcgttccctttcttccttgtttctttttctgcacaatatttcaagctataccaagcatacaatcaactccaacggatccgaatactagttggccaatcatgtaattagttatgtcacgcttacattcacgccctccccccacatccgctctaaccgaaaaggaaggagttagacaacctgaagtctaggtccctatttatttttttatagttatgttagtattaagaacgttatttatatttcaaatttttcttttttttctgtacagacgcgtgtacgcatgtaacattatactgaaaaccttgcttgagaaggttttgggacgctcgaaggctttaatttgcaagcttggccaccacacaccatagcttcaaaatgtttctactccttttttactcttccagattttctcggactccgcgcatcgccgtaccacttcaaaacacccaagcacagcatactaaattttccctctttcttcctctagggtgtcgttaattacccgtactaaaggtttggaaaagaaaaaagagaccgcctcgtttctttttcttcgtcgaaaaaggcaataaaaatttttatcacgtttctttttcttgaaatttttttttttagtttttttctctttcagtgacctccattgatatttaagttaataaacggtcttcaatttctcaagtttcagtttcatttttcttgttctattacaactttttttacttcttgttcattagaaagaaagcatagcaatctaatctaagggatgagcgaagaaagcttattcgagtcttctccacagaagatggagtacgaaattacaaactactcagaaagacatacagaacttccaggtcatttcattggcctcaatacagtagataaactagaggagtccccgttaagggactttgttaagagtcacggtggtcacacggtcatatccaagatcctgatagcaaataagtttaaacaaaatgaagtgaagttcctatactttctagagaataggaacttctatagtgagtcgaataagggcgacacaaaatttattctaaatgcataataaatactgataacatcttatagtttgtattatattttgtattatcgttgacatgtataattttgatatcaaaaactgattttccctttattattttcgagatttattttcttaattctctttaacaaactagaaatattgtatatacaaaaaatcataaataatagatgaatagtttaattataggtgttcatcaatcgaaaaagcaacgtatcttatttaaagtgcgttgcttttttctcatttataaggttaaataattctcatatatcaagcaaagtgacaggcgcccttaaatattctgacaaatgctctttccctaaactccccccataaaaaaacccgccgaagcgggtttttacgttatttgcggattaacgattactcgttatcagaaccgcccagggggcccgagcttaagactggccgtcgttttacaacacagaaagagtttgtagaaacgcaaaaaggccatccgtcaggggccttctgcttagtttgatgcctggcagttccctactctcgccttccgcttcctcgctcactgactcgctgcgctcggtcgttcggctgcggcgagcggtatcagctcactcaaaggcggtaatacggttatccacagaatcaggggataacgcaggaaagaacatgtgagcaaaaggccagcaaaaggccaggaaccgtaaaaaggccgcgttgctggcgtttttccataggctccgcccccctgacgagcatcacaaaaatcgacgctcaagtcagaggtggcgaaacccgacaggactataaagataccaggcgtttccccctggaagctccctcgtgcgctctcctgttccgaccctgccgcttaccggatacctgtccgcctttctcccttcgggaagcgtggcgctttctcatagctcacgctgtaggtatctcagttcggtgtaggtcgttcgctccaagctgggctgtgtgcacgaaccccccgttcagcccgaccgctgcgccttatccggtaactatcgtcttgagtccaacccggtaagacacgacttatcgccactggcagcagccactggtaacaggattagcagagcgaggtatgtaggcggtgctacagagttcttgaagtggtgggctaactacggctacactagaagaacagtatttggtatctgcgctctgctgaagccagttaccttcggaaaaagagttggtagctcttgatccggcaaacaaaccaccgctggtagcggtggtttttttgtttgcaagcagcagattacgcgcagaaaaaaaggatctcaagaagatcctttgatcttttctacggggtctgacgctcagtggaacgacgcgcgcgtaactcacgttaagggattttggtcatgagcttgcgccgtcccgtcaagtcagcgtaatgct

SEQ ID NO: 151 - DNA, 3710 bp, Artificial Sequence
  Description of Artificial Sequence: Synthetic polynucleotide
gatcggatccatggccggtacgggtcgtttggctggtaaaattgcattgatcaccggtggtgctggtaacattggttccgagctgacccgccgttttctggccgagggtgcgacggttattatcagcggccgtaaccgtgcgaagctgaccgcgctggccgagcgcatgcaagccgaggccggcgtgccggccaagcgcattgatttggaggtgatggatggttccgaccctgtggctgtccgtgccggtatcgaggcaatcgtcgctcgccacggtcagattgacattctggttaacaacgcgggctccgccggtgcccaacgtcgcttggcggaaattccgctgacggaggcagaattgggtccgggtgcggaggagactttgcacgcttcgatcgcgaatctgttgggcatgggttggcacctgatgcgtattgcggctccgcacatgccagttggctccgcagttatcaacgtttcgactattttctcgcgcgcagagtactatggtcgcattccgtacgttaccccgaaggcagcgctgaacgctttgtcccagctggctgcccgcgagctgggcgctcgtggcatccgcgttaacactattttcccaggtcctattgagtccgaccgcatccgtaccgtgtttcaacgtatggatcaactgaagggtcgcccggagggcgacaccgcccatcactttttgaacaccatgcgcctgtgccgcgcaaacgaccaaggcgctttggaacgccgctttccgtccgttggcgatgttgctgatgcggctgtgtttctggcttctgctgagagcgcggcactgtcgggtgagacgattgaggtcacccacggtatggaactgccggcgtgtagcgaaacctccttgttggcgcgtaccgatctgcgtaccatcgacgcgagcggtcgcactaccctgatttgcgctggcgatcaaattgaagaagttatggccctgacgggcatgctgcgtacgtgcggtagcgaagtgattatcggcttccgttctgcggctgccctggcgcaatttgagcaggcagtgaatgaatctcgccgtctggcaggtgcggatttcaccccgccgatcgctttgccgttggacccacgtgacccggccaccattgatgcggttttcgattggggcgcaggcgagaatacgggtggcatccatgcggcggtcattctgccggcaacctcccacgaaccggctccgtgcgtgattgaagtcgatgacgaacgcgtcctgaatttcctggccgatgaaattaccggcaccatcgttattgcgagccgtttggcgcgctattggcaatcccaacgcctgaccccgggtgcccgtgcccgcggtccgcgtgttatctttctgagcaacggtgccgatcaaaatggtaatgtttacggtcgtattcaatctgcggcgatcggtcaattgattcgcgtttggcgtcacgaggcggagttggactatcaacgtgcatccgccgcaggcgatcacgttctgccgccggtttgggcgaaccagattgtccgtttcgctaaccgctccctggaaggtctggagttcgcgtgcgcgtggaccgcacagctgctgcacagccaacgtcatattaacgaaattacgctgaacattccagccaatattagcgcgaccacgggcgcacgttccgccagcgtcggctgggccgagtccttgattggtctgcacctgggcaaggtggctctgattaccggtggttcggcgggcatcggtggtcaaatcggtcgtctgctggccttgtctggcgcgcgtgtgatgctggccgctcgcgatcgccataaattggaacagatgcaagccatgattcaaagcgaattggcggaggttggttataccgatgtggaggaccgtgtgcacatcgctccgggttgcgatgtgagcagcgaggcgcagctggcagatctggtggaacgtacgctgtccgcattcggtaccgtggattatttgattaataacgccggtattgcgggcgtggaggagatggtgatcgacatgccggtggaaggctggcgtcacaccctgtttgccaacctgatttcgaattattcgctgatgcgcaagttggcgccgctgatgaagaagcaaggtagcggttacatcctgaacgtttcttcctattttggcggtgagaaggacgcggcgattccttatccgaaccgcgccgactacgccgtctccaaggctggccaacgcgcgatggcggaagtgttcgctcgtttcctgggtccagagattcagatcaatgctattgccccaggtccggttgaaggcgaccgcctgcgtggtaccggtgagcgtccgggcctgtttgctcgtcgcgcccgtctgatcttggagaataaacgcctgaacgaattgcacgcggctttgattgctgcggcccgcaccgatgagcgctcgatgcacgagttggttgaattgttgctgccgaacgacgtggccgcgttggagcagaacccagcggcccctaccgcgctgcgtgagctggcacgccgcttccgtagcgaaggtgatccggcggcaagctcctcgtccgccttgctgaatcgctccatcgctgccaagctgttggctcgcttgcataacggtggctatgtgctgccggcggatatttttgcaaatctgcctaatccgccggacccgttctttacccgtgcgcaaattgaccgcgaagctcgcaaggtgcgtgatggtattatgggtatgctgtatctgcagcgtatgccaaccgagtttgacgtcgctatggcaaccgtgtactatctggccgatcgtaacgtgagcggcgaaactttccatccgtctggtggtttgcgctacgagcgtaccccgaccggtggcgagctgttcggcctgccatcgccggaacgtctggcggagctggttggtagcacggtgtacctgatcggtgaacacctgaccgagcacctgaacctgctggctcgtgcctatttggagcgctacggtgcccgtcaagtggtgatgattgttgagacggaaaccggtgcggaaaccatgcgtcgtctgttgcatgatcacgtcgaggcaggtcgcctgatgactattgtggcaggtgatcagattgaggcagcgattgaccaagcgatcacgcgctatggccgtccgggtccggtggtgtgcactccattccgtccactgccaaccgttccgctggtcggtcgtaaagactccgattggagcaccgttttgagcgaggcggaatttgcggaactgtgtgagcatcagctgacccaccatttccgtgttgctcgtaagatcgccttgtcggatggcgcgtcgctggcgttggttaccccggaaacgactgcgactagcaccacggagcaatttgctctggcgaacttcatcaagaccaccctgcacgcgttcaccgcgaccatcggtgttgagtcggagcgcaccgcgcaacgtattctgattaaccaggttgatctgacgcgccgcgcccgtgcggaagagccgcgtgacccgcacgagcgtcagcaggaattggaacgcttcattgaagccgttctgctggttaccgctccgctgcctcctgaggcagacacgcgctacgcaggccgtattcaccgcggtcgtgcgattaccgtcggatctagatctcaccatcaccaccattaaactagtgatc

SEQ ID NO: 152 - DNA, 6477 bp, Artificial Sequence
  Description of Artificial Sequence: Synthetic polynucleotide
aaactccctctgcccttccctcccgcttcatccttatttttggacaataaactagagaacaatttgaacttgaattggaattcagattcagagcaagagacaagaaacttccctttttcttctccacatattattatttattcgtgtattttcttttaacgatacgatacgatacgacacgatacgatacgacacgctactatacagtgacgtcagattgtactgagagtgcagattgtactgagagtgcaccataaattcccgttttaagagcttggtgagcgctaggagtcactgccaggtatcgtttgaacacggcattagtcagggaagtcataacacagtcctttcccgcaattttctttttctattactcttggcctcctctagtacactctatatttttttatgcctcggtaatgattttcatttttttttttcccctagcggatgactctttttttttcttagcgattggcattatcacataatgaattatacattatataaagtaatgtgatttcttcgaagaatatactaaaaaatgagcaggcaagataaacgaaggcaaagatgacagagcagaaagccctagtaaagcgtattacaaatgaaaccaagattcagattgcgatctctttaaagggtggtcccctagcgatagagcactcgatcttcccagaaaaagaggcagaagcagtagcagaacaggccacacaatcgcaagtgattaacgtccacacaggtatagggtttctggaccatatgatacatgctctggccaagcattccggctggtcgctaatcgttgagtgcattggtgacttacacatagacgaccatcacaccactgaagactgcgggattgctctcggtcaagcttttaaagaggccctactggcgcgtggagtaaaaaggtttggatcaggatttgcgcctttggatgaggcactttccagagcggtggtagatctttcgaacaggccgtacgcagttgtcgaacttggtttgcaaagggagaaagtaggagatctctcttgcgagatgatcccgcattttcttgaaagctttgcagaggctagcagaattaccctccacgttgattgtctgcgaggcaagaatgatcatcaccgtagtgagagtgcgttcaaggctcttgcggttgccataagagaagccacctcgcccaatggtaccaacgatgttccctccaccaaaggtgttcttatgtagtgacaccgattatttaaagctgcagcatacgatatatatacatgtgtatatatgtatacctatgaatgtcagtaagtatgtatacgaacagtatgatactgaagatgacaaggtaatgcatcattctatacgtgtcattctgaacgaggcgcgctttccttttttctttttgctttttctttttttttctcttgaactcgacggatctatgcggtgtgaaataccgcacaggtgtgaaataccgcacagtcatgagatccgataacttcttttctttttttttcttttctctctcccccgttgttgtctcaccatatccgcaatgacaaaaaaaatgatggaagacactaaaggaaaaaattaacgacaaagacagcaccaacagatgtcgttgttccagagctgatgaggggtatcttcgaacacacgaaactttttccttccttcattcacgcacactactctctaatgagcaacggtatacggccttccttccagttacttgaatttgaaataaaaaaagtttgccgctttgctatcaagtataaatagacctgcaattattaatcttttgtttcctcgtcattgttctcgttccctttcttccttgtttctttttctgcacaatatttcaagctataccaagcatacaatcaactccaacggatccatggccggtacgggtcgtttggctggtaaaattgcattgatcaccggtggtgctggtaacattggttccgagctgacccgccgttttctggccgagggtgcgacggttattatcagcggccgtaaccgtgcgaagctgaccgcgctggccgagcgcatgcaagccgaggccggcgtgccggccaagcgcattgatttggaggtgatggatggttccgaccctgtggctgtccgtgccggtatcgaggcaatcgtcgctcgccacggtcagattgacattctggttaacaacgcgggctccgccggtgcccaacgtcgcttggcggaaattccgctgacggaggcagaattgggtccgggtgcggaggagactttgcacgcttcgatcgcgaatctgttgggcatgggttggcacctgatgcgtattgcggctccgcacatgccagttggctccgcagttatcaacgtttcgactattttctcgcgcgcagagtactatggtcgcattccgtacgttaccccgaaggcagcgctgaacgctttgtcccagctggctgcccgcgagctgggcgctcgtggcatccgcgttaacactattttcccaggtcctattgagtccgaccgcatccgtaccgtgtttcaacgtatggatcaactgaagggtcgcccggagggcgacaccgcccatcactttttgaacaccatgcgcctgtgccgcgcaaacgaccaaggcgctttggaacgccgctttccgtccgttggcgatgttgctgatgcggctgtgtttctggcttctgctgagagcgcggcactgtcgggtgagacgattgaggtcacccacggtatggaactgccggcgtgtagcgaaacctccttgttggcgcgtaccgatctgcgtaccatcgacgcgagcggtcgcactaccctgatttgcgctggcgatcaaattgaagaagttatggccctgacgggcatgctgcgtacgtgcggtagcgaagtgattatcggcttccgttctgcggctgccctggcgcaatttgagcaggcagtgaatgaatctcgccgtctggcaggtgcggatttcaccccgccgatcgctttgccgttggacccacgtgacccggccaccattgatgcggttttcgattggggcgcaggcgagaatacgggtggcatccatgcggcggtcattctgccggcaacctcccacgaaccggctccgtgcgtgattgaagtcgatgacgaacgcgtcctgaatttcctggccgatgaaattaccggcaccatcgttattgcgagccgtttggcgcgctattggcaatcccaacgcctgaccccgggtgcccgtgcccgcggtccgcgtgttatctttctgagcaacggtgccgatcaaaatggtaatgtttacggtcgtattcaatctgcggcgatcggtcaattgattcgcgtttggcgtcacgaggcggagttggactatcaacgtgcatccgccgcaggcgatcacgttctgccgccggtttgggcgaaccagattgtccgtttcgctaaccgctccctggaaggtctggagttcgcgtgcgcgtggaccgcacagctgctgcacagccaacgtcatattaacgaaattacgctgaacattccagccaatattagcgcgaccacgggcgcacgttccgccagcgtcggctgggccgagtccttgattggtctgcacctgggcaaggtggctctgattaccggtggttcggcgggcatcggtggtcaaatcggtcgtctgctggccttgtctggcgcgcgtgtgatgctggccgctcgcgatcgccataaattggaacagatgcaagccatgattcaaagcgaattggcggaggttggttataccgatgtggaggaccgtgtgcacatcgctccgggttgcgatgtgagcagcgaggcgcagctggcagatctggtggaacgtacgctgtccgcattcggtaccgtggattatttgattaataacgccggtattgcgggcgtggaggagatggtgatcgacatgccggtggaaggctggcgtcacaccctgtttgccaacctgatttcgaattattcgctgatgcgcaagttggcgccgctgatgaagaagcaaggtagcggttacatcctgaacgtttcttcctattttggcggtgagaaggacgcggcgattccttatccgaaccgcgccgactacgccgtctccaaggctggccaacgcgcgatggcggaagtgttcgctcgtttcctgggtccagagattcagatcaatgctattgccccaggtccggttgaaggcgaccgcctgcgtggtaccggtgagcgtccgggcctgtttgctcgtcgcgcccgtctgatcttggagaataaacgcctgaacgaattgcacgcggctttgattgctgcggcccgcaccgatgagcgctcgatgcacgagttggttgaattgttgctgccgaacgacgtggccgcgttggagcagaacccagcggcccctaccgcgctgcgtgagctggcacgccgcttccgtagcgaaggtgatccggcggcaagctcctcgtccgccttgctgaatcgctccatcgctgccaagctgttggctcgcttgcataacggtggctatgtgctgccggcggatatttttgcaaatctgcctaatccgccggacccgttctttacccgtgcgcaaattgaccgcgaagctcgcaaggtgcgtgatggtattatgggtatgctgtatctgcagcgtatgccaaccgagtttgacgtcgctatggcaaccgtgtactatctggccgatcgtaacgtgagcggcgaaactttccatccgtctggtggtttgcgctacgagcgtaccccgaccggtggcgagctgttcggcctgccatcgccggaacgtctggcggagctggttggtagcacggtgtacctgatcggtgaacacctgaccgagcacctgaacctgctggctcgtgcctatttggagcgctacggtgcccgtcaagtggtgatgattgttgagacggaaaccggtgcggaaaccatgcgtcgtctgttgcatgatcacgtcgaggcaggtcgcctgatgactattgtggcaggtgatcagattgaggcagcgattgaccaagcgatcacgcgctatggccgtccgggtccggtggtgtgcactccattccgtccactgccaaccgttccgctggtcggtcgtaaagactccgattggagcaccgttttgagcgaggcggaatttgcggaactgtgtgagcatcagctgacccaccatttccgtgttgctcgtaagatcgccttgtcggatggcgcgtcgctggcgttggttaccccggaaacgactgcgactagcaccacggagcaatttgctctggcgaacttcatcaagaccaccctgcacgcgttcaccgcgaccatcggtgttgagtcggagcgcaccgcgcaacgtattctgattaaccaggttgatctgacgcgccgcgcccgtgcggaagagccgcgtgacccgcacgagcgtcagcaggaattggaacgcttcattgaagccgttctgctggttaccgctccgctgcctcctgaggcagacacgcgctacgcaggccgtattcaccgcggtcgtgcgattaccgtcggatctagatctcaccatcaccaccattaaactagttggccaatcatgtaattagttatgtcacgcttacattcacgccctccccccacatccgctctaaccgaaaaggaaggagttagacaacctgaagtctaggtccctatttatttttttatagttatgttagtattaagaacgttatttatatttcaaatttttcttttttttctgtacagacgcgtgtacgcatgtaacattatactgaaaaccttgcttgagaaggttttgggacgctcgaaggctttaatttgcaagcttggccaccacacaccatagcttcaaaatgtttctactccttttttactcttccagattttctcggactccgcgcatcgccgtaccacttcaaaacacccaagcacagcatactaaattttccctctttcttcctctagggtgtcgttaattacccgtactaaaggtttggaaaagaaaaaagagaccgcctcgtttctttttcttcgtcgaaaaaggcaataaaaatttttatcacgtttctttttcttgaaatttttttttttagtttttttctctttcagtgacctccattgatatttaagttaataaacggtcttcaatttctcaagtttcagtttcatttttcttgttctattacaactttttttacttcttgttcattagaaagaaagcatagcaatctaatctaagggatgagcgaagaaagcttattcgagtcttctccacagaagatggagtacgaaattacaaactactcagaaagacatacagaacttccaggtcatttcattggcctcaatacagtagataaactagaggagtccccgttaagggactttgttaagagtcacggtggtcacacggtcatatccaagatcctgatagcaaataagttt

SEQ ID NO: 153 - DNA, 6233 bp, Artificial Sequence
  Description of Artificial Sequence: Synthetic polynucleotide
tcgcgcgtttcggtgatgacggtgaaaacctctgacacatgcagctcccggagacggtcacagcttgtctgtaagcggatgccgggagcagacaagcccgtcagggcgcgtcagcgggtgttggcgggtgtcggggctggcttaactatgcggcatcagagcagattgtactgagagtgcaccatagccatcctcatgaaaactgtgtaacataataaccgaagtgtcgaaaaggtggcaccttgtccaattgaacacgctcgatgaaaaaaataagatatatataaggttaagtaaagcgtctgttagaaaggaagtttttcctttttcttgctctcttgtcttttcatctactatttccttcgtgtaatacagggtcgtcagatacatagatacaattctattacccccatccatacaatgccatctcatttcgatactgttcaactacacgccggccaagagaaccctggtgacaatgctcacagatccagagctgtaccaatttacgccaccacttcttatgttttcgaaaactctaagcatggttcgcaattgtttggtctagaagttccaggttacgtctattcccgtttccaaaacccaaccagtaatgttttggaagaaagaattgctgctttagaaggtggtgctgctgctttggctgtttcctccggtcaagccgctcaaacccttgccatccaaggtttggcacacactggtgacaacatcgtttccacttcttacttatacggtggtacttataaccagttcaaaatctcgttcaaaagatttggtatcgaggctagatttgttgaaggtgacaatccagaagaattcgaaaaggtctttgatgaaagaaccaaggctgtttatttggaaaccattggtaatccaaagtacaatgttccggattttgaaaaaattgttgcaattgctcacaaacacggtattccagttgtcgttgacaacacatttggtgccggtggttacttctgtcagccaattaaatacggtgctgatattgtaacacattctgctaccaaatggattggtggtcatggtactactatcggtggtattattgttgactctggtaagttcccatggaaggactacccagaaaagttccctcaattctctcaacctgccgaaggatatcacggtactatctacaatgaagcctacggtaacttggcatacatcgttcatgttagaactgaactattaagagatttgggtccattgatgaacccatttgcctctttcttgctactacaaggtgttgaaacattatctttgagagctgaaagacacggtgaaaatgcattgaagttagccaaatggttagaacaatccccatacgtatcttgggtttcataccctggtttagcatctcattctcatcatgaaaatgctaagaagtatctatctaacggtttcggtggtgtcttatctttcggtgtaaaagacttaccaaatgccgacaaggaaactgacccattcaaactttctggtgctcaagttgttgacaatttaaagcttgcctctaacttggccaatgttggtgatgccaagaccttagtcattgctccatacttcactacccacaaacaattaaatgacaaagaaaagttggcatctggtgttaccaaggacttaattcgtgtctctgttggtatcgaatttattgatgacattattgcagacttccagcaatcttttgaaactgttttcgctggccaaaaaccatgagtgtgcgtaatgagttgtaaaattatgtataaacctactttctctcacaagttatgcggtgtgaaataccgcacagatgcgtaaggagaaaataccgcatcaggaaattgtaaacgttaatattttgttaaaattcgcgttaaatttttgttaaatcagctcattttttaaccaataggccgaaatcggcaaaatcccttataaatcaaaagaatagaccgagatagggttgagtgttgttccagtttggaacaagagtccactattaaagaacgtggactccaacgtcaaagggcgaaaaaccgtctatcagggcgatggcccactacgtgaaccatcaccctaatcaagttttttggggtcgaggtgccgtaaagcactaaatcggaaccctaaagggagcccccgatttagagcttgacggggaaagccggcgaacgtggcgagaaaggaagggaagaaagcgaaaggagcgggcgctagggcgctggcaagtgtagcggtcacgctgcgcgtaaccaccacacccgccgcgcttaatgcgccgctacagggcgcgtcgcgccattcgccattcaggctgcgcaactgttgggaagggcgatcggtgcgggcctcttcgctattacgccagctggcgaaagggggatgtgctgcaaggcgattaagttgggtaacgccagggttttcccagtcacgacgttgtaaaacgacggccagtgagcgcgcgtaatacgactcactatagggcgaattgggtaccgggccccccctcgaggtcgacggtatcgataagcttgatatcgaattcctgcagcccgggggatccactagttctagagcggccgccaccgcggtggagctccagcttttgttccctttagtgagggttaattgcgcgcttggcgtaatcatggtcatagctgtttcctgtgtgaaattgttatccgctcacaattccacacaacatacgagccggaagcataaagtgtaaagcctggggtgcctaatgagtgagctaactcacattaattgcgttgcgctcactgcccgctttccagtcgggaaacctgtcgtgccagctgcattaatgaatcggccaacgcgcggggagaggcggtttgcgtattgggcgctcttccgcttcctcgctcactgactcgctgcgctcggtcgttcggctgcggcgagcggtatcagctcactcaaaggcggtaatacggttatccacagaatcaggggataacgcaggaaagaacatgtgagcaaaaggccagcaaaaggccaggaaccgtaaaaaggccgcgttgctggcgtttttccataggctccgcccccctgacgagcatcacaaaaatcgacgctcaagtcagaggtggcgaaacccgacaggactataaagataccaggcgtttccccctggaagctccctcgtgcgctctcctgttccgaccctgccgcttaccggatacctgtccgcctttctcccttcgggaagcgtggcgctttctcatagctcacgctgtaggtatctcagttcggtgtaggtcgttcgctccaagctgggctgtgtgcacgaaccccccgttcagcccgaccgctgcgccttatccggtaactatcgtcttgagtccaacccggtaagacacgacttatcgccactggcagcagccactggtaacaggattagcagagcgaggtatgtaggcggtgctacagagttcttgaagtggtggcctaactacggctacactagaaggacagtatttggtatctgcgctctgctgaagccagttaccttcggaaaaagagttggtagctcttgatccggcaaacaaaccaccgctggtagcggtggtttttttgtttgcaagcagcagattacgcgcagaaaaaaaggatctcaagaagatcctttgatcttttctacggggtctgacgctcagtggaacgaaaactcacgttaagggattttggtcatgagattatcaaaaaggatcttcacctagatccttttaaattaaaaatgaagttttaaatcaatctaaagtatatatgagtaaacttggtctgacagttaccaatgcttaatcagtgaggcacctatctcagcgatctgtctatttcgttcatccatagttgcctgactccccgtcgtgtagataactacgatacgggagggcttaccatctggccccagtgctgcaatgataccgcgagacccacgctcaccggctccagatttatcagcaataaaccagccagccggaagggccgagcgcagaagtggtcctgcaactttatccgcctccatccagtctattaattgttgccgggaagctagagtaagtagttcgccagttaatagtttgcgcaacgttgttgccattgctacaggcatcgtggtgtcacgctcgtcgtttggtatggcttcattcagctccggttcccaacgatcaaggcgagttacatgatcccccatgttgtgcaaaaaagcggttagctccttcggtcctccgatcgttgtcagaagtaagttggccgcagtgttatcactcatggttatggcagcactgcataattctcttactgtcatgccatccgtaagatgcttttctgtgactggtgagtactcaaccaagtcattctgagaatagtgtatgcggcgaccgagttgctcttgcccggcgtcaatacgggataataccgcgccacatagcagaactttaaaagtgctcatcattggaaaacgttcttcggggcgaaaactctcaaggatcttaccgctgttgagatccagttcgatgtaacccactcgtgcacccaactgatcttcagcatcttttactttcaccagcgtttctgggtgagcaaaaacaggaaggcaaaatgccgcaaaaaagggaataagggcgacacggaaatgttgaatactcatactcttcctttttcaatattattgaagcatttatcagggttattgtctcatgagcggatacatatttgaatgtatttagaaaaataaacaaataggggttccgcgcacatttccccgaaaagtgccacctgaacgaagcatctgtgcttcattttgtagaacaaaaatgcaacgcgagagcgctaatttttcaaacaaagaatctgagctgcatttttacagaacagaaatgcaacgcgaaagcgctattttaccaacgaagaatctgtgcttcatttttgtaaaacaaaaatgcaacgcgagagcgctaatttttcaaacaaagaatctgagctgcatttttacagaacagaaatgcaacgcgagagcgctattttaccaacaaagaatctatacttcttttttgttctacaaaaatgcatcccgagagcgctatttttctaacaaagcatcttagattactttttttctcctttgtgcgctctataatgcagtctcttgataactttttgcactgtaggtccgttaaggttagaagaaggctactttggtgtctattttctcttccataaaaaaagcctgactccacttcccgcgtttactgattactagcgaagctgcgggtgcattttttcaagataaaggcatccccgattatattctataccgatgtggattgcgcatactttgtgaacagaaagtgatagcgttgatgattcttcattggtcagaaaattatgaacggtttcttctattttgtctctatatactacgtataggaaatgtttacattttcgtattgttttcgattcactctatgaatagttcttactacaatttttttgtctaaagagtaatactagagataaacataaaaaatgtagaggtcgagtttagatgcaagttcaaggagcgaaaggtggatgggtaggttatatagggatatagcacagagatatatagcaaagagatacttttgagcaatgtttgtggaagcggtattcgcaatattttagtagctcgttacagtccggtgcgtttttggttttttgaaagtgcgtcttcagagcgcttttggttttcaaaagcgctctgaagttcctatactttctagagaataggaacttcggaataggaacttcaaagcgtttccgaaaacgagcgcttccgaaaatgcaacgcgagctgcgcacatacagctcactgttcacgtcgcacctatatctgcgtgttgcctgtatatatatatacatgagaagaacggcatagtgcgtgtttatgcttaaatgcgtacttatatgcgtctatttatgtaggatgaaaggtagtctagtacctcctgtgatattatcccattccatgcggggtatcgtatgcttccttcagcactaccctttagctgttctatatgctgccactcctcaattggattagtctcatccttcaatgctatcatttcctttgatattggatcactaagaaaccattattatcatgacattaacctataaaaataggcgtatcacgaggccctttcgtc

SEQ ID NO: 154 - DNA, 12710 bp, Artificial Sequence
  Description of Artificial Sequence: Synthetic polynucleotide
tcgcgcgtttcggtgatgacggtgaaaacctctgacacatgcagctcccggagacggtcacagcttgtctgtaagcggatgccgggagcagacaagcccgtcagggcgcgtcagcgggtgttggcgggtgtcggggctggcttaactatgcggcatcagagcagattgtactgagagtgcaccatagccatcctcatgaaaactgtgtaacataataaccgaagtgtcgaaaaggtggcaccttgtccaattgaacacgctcgatgaaaaaaataagatatatataaggttaagtaaagcgtctgttagaaaggaagtttttcctttttcttgctctcttgtcttttcatctactatttccttcgtgtaatacagggtcgtcagatacatagatacaattctattacccccatccatacaatgccatctcatttcgatactgttcaactacacgccggccaagagaaccctggtgacaatgctcacagatccagagctgtaccaatttacgccaccacttcttatgttttcgaaaactctaagcatggttcgcaattgtttggtctagaagttccaggttacgtctattcccgtttccaaaacccaaccagtaatgttttggaagaaagaattgctgctttagaaggtggtgctgctgctttggctgtttcctccggtcaagccgctcaaacccttgccatccaaggtttggcacacactggtgacaacatcgtttccacttcttacttatacggtggtacttataaccagttcaaaatctcgttcaaaagatttggtatcgaggctagatttgttgaaggtgacaatccagaagaattcgaaaaggtctttgatgaaagaaccaaggctgtttatttggaaaccattggtaatccaaagtacaatgttccggattttgaaaaaattgttgcaattgctcacaaacacggtattccagttgtcgttgacaacacatttggtgccggtggttacttctgtcagccaattaaatacggtgctgatattgtaacacattctgctaccaaatggattggtggtcatggtactactatcggtggtattattgttgactctggtaagttcccatggaaggactacccagaaaagttccctcaattctctcaacctgccgaaggatatcacggtactatctacaatgaagcctacggtaacttggcatacatcgttcatgttagaactgaactattaagagatttgggtccattgatgaacccatttgcctctttcttgctactacaaggtgttgaaacattatctttgagagctgaaagacacggtgaaaatgcattgaagttagccaaatggttagaacaatccccatacgtatcttgggtttcataccctggtttagcatctcattctcatcatgaaaatgctaagaagtatctatctaacggtttcggtggtgtcttatctttcggtgtaaaagacttaccaaatgccgacaaggaaactgacccattcaaactttctggtgctcaagttgttgacaatttaaagcttgcctctaacttggccaatgttggtgatgccaagaccttagtcattgctccatacttcactacccacaaacaattaaatgacaaagaaaagttggcatctggtgttaccaaggacttaattcgtgtctctgttggtatcgaatttattgatgacattattgcagacttccagcaatcttttgaaactgttttcgctggccaaaaaccatgagtgtgcgtaatgagttgtaaaattatgtataaacctactttctctcacaagttatgcggtgtgaaataccgcacagatgcgtaaggagaaaataccgcatcaggaaattgtaaacgttaatattttgttaaaattcgcgttaaatttttgttaaatcagctcattttttaaccaataggccgaaatcggcaaaatcccttataaatcaaaagaatagaccgagatagggttgagtgttgttccagtttggaacaagagtccactattaaagaacgtggactccaacgtcaaagggcgaaaaaccgtctatcagggcgatggcccactacgtgaaccatcaccctaatcaagttttttggggtcgaggtgccgtaaagcactaaatcggaaccctaaagggagcccccgatttagagcttgacggggaaagccggcgaacgtggcgagaaaggaagggaagaaagcgaaaggagcgggcgctagggcgctggcaagtgtagcggtcacgctgcgcgtaaccaccacacccgccgcgcttaatgcgccgctacagggcgcgtcgcgccattcgccattcaggctgcgcaactgttgggaagggcgatcggtgcgggcctcttcgctattacgccagctggcgaaagggggatgtgctgcaaggcgattaagttgggtaacgccagggttttcccagtcacgacgttgtaaaacgacggccagtgagcgcgcgtaatacgactcactatagggcgaattgggtaccgggccccccctcgaggtcgacggtatcgataagcttgatatcgaattcctgcagcccaaactccctctgcccttccctcccgcttcatccttatttttggacaataaactagagaacaatttgaacttgaattggaattcagattcagagcaagagacaagaaacttccctttttcttctccacatattattatttattcgtgtattttcttttaacgatacgatacgatacgacacgatacgatacgacacgctactatacagtgacgtcagattgtactgagagtgcagattgtactgagagtgcaccataaattcccgttttaagagcttggtgagcgctaggagtcactgccaggtatcgtttgaacacggcattagtcagggaagtcataacacagtcctttcccgcaattttctttttctattactcttggcctcctctagtacactctatatttttttatgcctcggtaatgattttcatttttttttttcccctagcggatgactctttttttttcttagcgattggcattatcacataatgaattatacattatataaagtaatgtgatttcttcgaagaatatactaaaaaatgagcaggcaagataaacgaaggcaaagatgacagagcagaaagccctagtaaagcgtattacaaatgaaaccaagattcagattgcgatctctttaaagggtggtcccctagcgatagagcactcgatcttcccagaaaaagaggcagaagcagtagcagaacaggccacacaatcgcaagtgattaacgtccacacaggtatagggtttctggaccatatgatacatgctctggccaagcattccggctggtcgctaatcgttgagtgcattggtgacttacacatagacgaccatcacaccactgaagactgcgggattgctctcggtcaagcttttaaagaggccctactggcgcgtggagtaaaaaggtttggatcaggatttgcgcctttggatgaggcactttccagagcggtggtagatctttcgaacaggccgtacgcagttgtcgaacttggtttgcaaagggagaaagtaggagatctctcttgcgagatgatcccgcattttcttgaaagctttgcagaggctagcagaattaccctccacgttgattgtctgcgaggcaagaatgatcatcaccgtagtgagagtgcgttcaaggctcttgcggttgccataagagaagccacctcgcccaatggtaccaacgatgttccctccaccaaaggtgttcttatgtagtgacaccgattatttaaagctgcagcatacgatatatatacatgtgtatatatgtatacctatgaatgtcagtaagtatgtatacgaacagtatgatactgaagatgacaaggtaatgcatcattctatacgtgtcattctgaacgaggcgcgctttccttttttctttttgctttttctttttttttctcttgaactcgacggatctatgcggtgtgaaataccgcacaggtgtgaaataccgcacagtcatgagatccgataacttcttttctttttttttcttttctctctcccccgttgttgtctcaccatatccgcaatgacaaaaaaaatgatggaagacactaaaggaaaaaattaacgacaaagacagcaccaacagatgtcgttgttccagagctgatgaggggtatcttcgaacacacgaaactttttccttccttcattcacgcacactactctctaatgagcaacggtatacggccttccttccagttacttgaatttgaaataaaaaaagtttgccgctttgctatcaagtataaatagacctgcaattattaatcttttgtttcctcgtcattgttctcgttccctttcttccttgtttctttttctgcacaatatttcaagctataccaagcatacaatcaactccaacggatccatggccggtacgggtcgtttggctggtaaaattgcattgatcaccggtggtgctggtaacattggttccgagctgacccgccgttttctggccgagggtgcgacggttattatcagcggccgtaaccgtgcgaagctgaccgcgctggccgagcgcatgcaagccgaggccggcgtgccggccaagcgcattgatttggaggtgatggatggttccgaccctgtggctgtccgtgccggtatcgaggcaatcgtcgctcgccacggtcagattgacattctggttaacaacgcgggctccgccggtgcccaacgtcgcttggcggaaattccgctgacggaggcagaattgggtccgggtgcggaggagactttgcacgcttcgatcgcgaatctgttgggcatgggttggcacctgatgcgtattgcggctccgcacatgccagttggctccgcagttatcaacgtttcgactattttctcgcgcgcagagtactatggtcgcattccgtacgttaccccgaaggcagcgctgaacgctttgtcccagctggctgcccgcgagctgggcgctcgtggcatccgcgttaacactattttcccaggtcctattgagtccgaccgcatccgtaccgtgtttcaacgtatggatcaactgaagggtcgcccggagggcgacaccgcccatcactttttgaacaccatgcgcctgtgccgcgcaaacgaccaaggcgctttggaacgccgctttccgtccgttggcgatgttgctgatgcggctgtgtttctggcttctgctgagagcgcggcactgtcgggtgagacgattgaggtcacccacggtatggaactgccggcgtgtagcgaaacctccttgttggcgcgtaccgatctgcgtaccatcgacgcgagcggtcgcactaccctgatttgcgctggcgatcaaattgaagaagttatggccctgacgggcatgctgcgtacgtgcggtagcgaagtgattatcggcttccgttctgcggctgccctggcgcaatttgagcaggcagtgaatgaatctcgccgtctggcaggtgcggatttcaccccgccgatcgctttgccgttggacccacgtgacccggccaccattgatgcggttttcgattggggcgcaggcgagaatacgggtggcatccatgcggcggtcattctgccggcaacctcccacgaaccggctccgtgcgtgattgaagtcgatgacgaacgcgtcctgaatttcctggccgatgaaattaccggcaccatcgttattgcgagccgtttggcgcgctattggcaatcccaacgcctgaccccgggtgcccgtgcccgcggtccgcgtgttatctttctgagcaacggtgccgatcaaaatggtaatgtttacggtcgtattcaatctgcggcgatcggtcaattgattcgcgtttggcgtcacgaggcggagttggactatcaacgtgcatccgccgcaggcgatcacgttctgccgccggtttgggcgaaccagattgtccgtttcgctaaccgctccctggaaggtctggagttcgcgtgcgcgtggaccgcacagctgctgcacagccaacgtcatattaacgaaattacgctgaacattccagccaatattagcgcgaccacgggcgcacgttccgccagcgtcggctgggccgagtccttgattggtctgcacctgggcaaggtggctctgattaccggtggttcggcgggcatcggtggtcaaatcggtcgtctgctggccttgtctggcgcgcgtgtgatgctggccgctcgcgatcgccataaattggaacagatgcaagccatgattcaaagcgaattggcggaggttggttataccgatgtggaggaccgtgtgcacatcgctccgggttgcgatgtgagcagcgaggcgcagctggcagatctggtggaacgtacgctgtccgcattcggtaccgtggattatttgattaataacgccggtattgcgggcgtggaggagatggtgatcgacatgccggtggaaggctggcgtcacaccctgtttgccaacctgatttcgaattattcgctgatgcgcaagttggcgccgctgatgaagaagcaaggtagcggttacatcctgaacgtttcttcctattttggcggtgagaaggacgcggcgattccttatccgaaccgcgccgactacgccgtctccaaggctggccaacgcgcgatggcggaagtgttcgctcgtttcctgggtccagagattcagatcaatgctattgccccaggtccggttgaaggcgaccgcctgcgtggtaccggtgagcgtccgggcctgtttgctcgtcgcgcccgtctgatcttggagaataaacgcctgaacgaattgcacgcggctttgattgctgcggcccgcaccgatgagcgctcgatgcacgagttggttgaattgttgctgccgaacgacgtggccgcgttggagcagaacccagcggcccctaccgcgctgcgtgagctggcacgccgcttccgtagcgaaggtgatccggcggcaagctcctcgtccgccttgctgaatcgctccatcgctgccaagctgttggctcgcttgcataacggtggctatgtgctgccggcggatatttttgcaaatctgcctaatccgccggacccgttctttacccgtgcgcaaattgaccgcgaagctcgcaaggtgcgtgatggtattatgggtatgctgtatctgcagcgtatgccaaccgagtttgacgtcgctatggcaaccgtgtactatctggccgatcgtaacgtgagcggcgaaactttccatccgtctggtggtttgcgctacgagcgtaccccgaccggtggcgagctgttcggcctgccatcgccggaacgtctggcggagctggttggtagcacggtgtacctgatcggtgaacacctgaccgagcacctgaacctgctggctcgtgcctatttggagcgctacggtgcccgtcaagtggtgatgattgttgagacggaaaccggtgcggaaaccatgcgtcgtctgttgcatgatcacgtcgaggcaggtcgcctgatgactattgtggcaggtgatcagattgaggcagcgattgaccaagcgatcacgcgctatggccgtccgggtccggtggtgtgcactccattccgtccactgccaaccgttccgctggtcggtcgtaaagactccgattggagcaccgttttgagcgaggcggaatttgcggaactgtgtgagcatcagctgacccaccatttccgtgttgctcgtaagatcgccttgtcggatggcgcgtcgctggcgttggttaccccggaaacgactgcgactagcaccacggagcaatttgctctggcgaacttcatcaagaccaccctgcacgcgttcaccgcgaccatcggtgttgagtcggagcgcaccgcgcaacgtattctgattaaccaggttgatctgacgcgccgcgcccgtgcggaagagccgcgtgacccgcacgagcgtcagcaggaattggaacgcttcattgaagccgttctgctggttaccgctccgctgcctcctgaggcagacacgcgctacgcaggccgtattcaccgcggtcgtgcgattaccgtcggatctagatctcaccatcaccaccattaaactagttggccaatcatgtaattagttatgtcacgcttacattcacgccctccccccacatccgctctaaccgaaaaggaaggagttagacaacctgaagtctaggtccctatttatttttttatagttatgttagtattaagaacgttatttatatttcaaatttttcttttttttctgtacagacgcgtgtacgcatgtaacattatactgaaaaccttgcttgagaaggttttgggacgctcgaaggctttaatttgcaagcttggccaccacacaccatagcttcaaaatgtttctactccttttttactcttccagattttctcggactccgcgcatcgccgtaccacttcaaaacacccaagcacagcatactaaattttccctctttcttcctctagggtgtcgttaattacccgtactaaaggtttggaaaagaaaaaagagaccgcctcgtttctttttcttcgtcgaaaaaggcaataaaaatttttatcacgtttctttttcttgaaatttttttttttagtttttttctctttcagtgacctccattgatatttaagttaataaacggtcttcaatttctcaagtttcagtttcatttttcttgttctattacaactttttttacttcttgttcattagaaagaaagcatagcaatctaatctaagggatgagcgaagaaagcttattcgagtcttctccacagaagatggagtacgaaattacaaactactcagaaagacatacagaacttccaggtcatttcattggcctcaatacagtagataaactagaggagtccccgttaagggactttgttaagagtcacggtggtcacacggtcatatccaagatcctgatagcaaataagtttgggggatccactagttctagagcggccgccaccgcggtggagctccagcttttgttccctttagtgagggttaattgcgcgcttggcgtaatcatggtcatagctgtttcctgtgtgaaattgttatccgctcacaattccacacaacatacgagccggaagcataaagtgtaaagcctggggtgcctaatgagtgagctaactcacattaattgcgttgcgctcactgcccgctttccagtcgggaaacctgtcgtgccagctgcattaatgaatcggccaacgcgcggggagaggcggtttgcgtattgggcgctcttccgcttcctcgctcactgactcgctgcgctcggtcgttcggctgcggcgagcggtatcagctcactcaaaggcggtaatacggttatccacagaatcaggggataacgcaggaaagaacatgtgagcaaaaggccagcaaaaggccaggaaccgtaaaaaggccgcgttgctggcgtttttccataggctccgcccccctgacgagcatcacaaaaatcgacgctcaagtcagaggtggcgaaacccgacaggactataaagataccaggcgtttccccctggaagctccctcgtgcgctctcctgttccgaccctgccgcttaccggatacctgtccgcctttctcccttcgggaagcgtggcgctttctcatagctcacgctgtaggtatctcagttcggtgtaggtcgttcgctccaagctgggctgtgtgcacgaaccccccgttcagcccgaccgctgcgccttatccggtaactatcgtcttgagtccaacccggtaagacacgacttatcgccactggcagcagccactggtaacaggattagcagagcgaggtatgtaggcggtgctacagagttcttgaagtggtggcctaactacggctacactagaaggacagtatttggtatctgcgctctgctgaagccagttaccttcggaaaaagagttggtagctcttgatccggcaaacaaaccaccgctggtagcggtggtttttttgtttgcaagcagcagattacgcgcagaaaaaaaggatctcaagaagatcctttgatcttttctacggggtctgacgctcagtggaacgaaaactcacgttaagggattttggtcatgagattatcaaaaaggatcttcacctagatccttttaaattaaaaatgaagttttaaatcaatctaaagtatatatgagtaaacttggtctgacagttaccaatgcttaatcagtgaggcacctatctcagcgatctgtctatttcgttcatccatagttgcctgactccccgtcgtgtagataactacgatacgggagggcttaccatctggccccagtgctgcaatgataccgcgagacccacgctcaccggctccagatttatcagcaataaaccagccagccggaagggccgagcgcagaagtggtcctgcaactttatccgcctccatccagtctattaattgttgccgggaagctagagtaagtagttcgccagttaatagtttgcgcaacgttgttgccattgctacaggcatcgtggtgtcacgctcgtcgtttggtatggcttcattcagctccggttcccaacgatcaaggcgagttacatgatcccccatgttgtgcaaaaaagcggttagctccttcggtcctccgatcgttgtcagaagtaagttggccgcagtgttatcactcatggttatggcagcactgcataattctcttactgtcatgccatccgtaagatgcttttctgtgactggtgagtactcaaccaagtcattctgagaatagtgtatgcggcgaccgagttgctcttgcccggcgtcaatacgggataataccgcgccacatagcagaactttaaaagtgctcatcattggaaaacgttcttcggggcgaaaactctcaaggatcttaccgctgttgagatccagttcgatgtaacccactcgtgcacccaactgatcttcagcatcttttactttcaccagcgtttctgggtgagcaaaaacaggaaggcaaaatgccgcaaaaaagggaataagggcgacacggaaatgttgaatactcatactcttcctttttcaatattattgaagcatttatcagggttattgtctcatgagcggatacatatttgaatgtatttagaaaaataaacaaataggggttccgcgcacatttccccgaaaagtgccacctgaacgaagcatctgtgcttcattttgtagaacaaaaatgcaacgcgagagcgctaatttttcaaacaaagaatctgagctgcatttttacagaacagaaatgcaacgcgaaagcgctattttaccaacgaagaatctgtgcttcatttttgtaaaacaaaaatgcaacgcgagagcgctaatttttcaaacaaagaatctgagctgcatttttacagaacagaaatgcaacgcgagagcgctattttaccaacaaagaatctatacttcttttttgttctacaaaaatgcatcccgagagcgctatttttctaacaaagcatcttagattactttttttctcctttgtgcgctctataatgcagtctcttgataactttttgcactgtaggtccgttaaggttagaagaaggctactttggtgtctattttctcttccataaaaaaagcctgactccacttcccgcgtttactgattactagcgaagctgcgggtgcattttttcaagataaaggcatccccgattatattctataccgatgtggattgcgcatactttgtgaacagaaagtgatagcgttgatgattcttcattggtcagaaaattatgaacggtttcttctattttgtctctatatactacgtataggaaatgtttacattttcgtattgttttcgattcactctatgaatagttcttactacaatttttttgtctaaagagtaatactagagataaacataaaaaatgtagaggtcgagtttagatgcaagttcaaggagcgaaaggtggatgggtaggttatatagggatatagcacagagatatatagcaaagagatacttttgagcaatgtttgtggaagcggtattcgcaatattttagtagctcgttacagtccggtgcgtttttggttttttgaaagtgcgtcttcagagcgcttttggttttcaaaagcgctctgaagttcctatactttctagagaataggaacttcggaataggaacttcaaagcgtttccgaaaacgagcgcttccgaaaatgcaacgcgagctgcgcacatacagctcactgttcacgtcgcacctatatctgcgtgttgcctgtatatatatatacatgagaagaacggcatagtgcgtgtttatgcttaaatgcgtacttatatgcgtctatttatgtaggatgaaaggtagtctagtacctcctgtgatattatcccattccatgcggggtatcgtatgcttccttcagcactaccctttagctgttctatatgctgccactcctcaattggattagtctcatccttcaatgctatcatttcctttgatattggatcactaagaaaccattattatcatgacattaacctataaaaataggcgtatcacgaggccctttcgtc

SEQ ID NO: 155 - DNA, 23 bp, Artificial Sequence
  Description of Artificial Sequence: Synthetic primer
gacaatatacaaacgcgattctc

SEQ ID NO: 156 - DNA, 23 bp, Artificial Sequence
  Description of Artificial Sequence: Synthetic primer
tgagactgaaatattgacgttga

SEQ ID NO: 157 - DNA, 21 bp, Artificial Sequence
  Description of Artificial Sequence: Synthetic primer
cccggttttcttttttttcac

SEQ ID NO: 158 - DNA, 24 bp, Artificial Sequence
  Description of Artificial Sequence: Synthetic primer
cgagagaattaccttttcttgaag

SEQ ID NO: 159 - DNA, 22 bp, Artificial Sequence
  Description of Artificial Sequence: Synthetic primer
gatgcactaatttaagggaagc

SEQ ID NO: 160 - DNA, 20 bp, Artificial Sequence
  Description of Artificial Sequence: Synthetic primer
gaaaacgaatgttgaatgcg

SEQ ID NO: 161 - DNA, 25 bp, Artificial Sequence
  Description of Artificial Sequence: Synthetic primer
cagatctacgtcacaccgtaatttg

SEQ ID NO: 162 - DNA, 25 bp, Artificial Sequence
  Description of Artificial Sequence: Synthetic primer
atcaaatactaccaactcacttgaa

SEQ ID NO: 163 - DNA, 25 bp, Artificial Sequence
  Description of Artificial Sequence: Synthetic primer
ctcgatacttttgtcaagcaaggtc

SEQ ID NO: 164 - DNA, 22 bp, Artificial Sequence
  Description of Artificial Sequence: Synthetic primer
tgaaaaactccccccacttaga

SEQ ID NO: 165 - DNA, 25 bp, Artificial Sequence
  Description of Artificial Sequence: Synthetic primer
gttattaatcagctctctgctttgc

SEQ ID NO: 166 - DNA, 22 bp, Artificial Sequence
  Description of Artificial Sequence: Synthetic primer
gtggctaaatcaatcaactggc

SEQ ID NO: 167 - DNA, 25 bp, Artificial Sequence
  Description of Artificial Sequence: Synthetic primer
ctctttctgatacttgattatcggg

SEQ ID NO: 168 - DNA, 25 bp, Artificial Sequence
  Description of Artificial Sequence: Synthetic primer
gttgatgaagtctcagatgttgctc

SEQ ID NO: 169 - DNA, 21 bp, Artificial Sequence
  Description of Artificial Sequence: Synthetic primer
ttaagaaaatgcaacgctgcc

SEQ ID NO: 170 - DNA, 23 bp, Artificial Sequence
  Description of Artificial Sequence: Synthetic primer
caaggcctaatttcagaagacca

SEQ ID NO: 171 - DNA, 24 bp, Artificial Sequence
  Description of Artificial Sequence: Synthetic primer
cagccgttgatcctctctaagtat

SEQ ID NO: 172 - DNA, 22 bp, Artificial Sequence
  Description of Artificial Sequence: Synthetic primer
gcgaaagatacctcgataaagc

SEQ ID NO: 173 - DNA, 23 bp, Artificial Sequence
  Description of Artificial Sequence: Synthetic primer
cgtgtttgatagaaacctccaac

SEQ ID NO: 174 - DNA, 22 bp, Artificial Sequence
  Description of Artificial Sequence: Synthetic primer
tcatggccttcttacaaggaca

SEQ ID NO: 175 - DNA, 23 bp, Artificial Sequence
  Description of Artificial Sequence: Synthetic primer
atttaaaagcttcctcactttcc

SEQ ID NO: 176 - DNA, 21 bp, Artificial Sequence
  Description of Artificial Sequence: Synthetic primer
ttgccaacacttctatgcatg

SEQ ID NO: 177 - DNA, 21 bp, Artificial Sequence
  Description of Artificial Sequence: Synthetic primer
tgttaaaccatcgttttcacg

SEQ ID NO: 178 - DNA, 20 bp, Artificial Sequence
  Description of Artificial Sequence: Synthetic primer
caatggtgccacttttgcta

SEQ ID NO: 179 - DNA, 24 bp, Artificial Sequence
  Description of Artificial Sequence: Synthetic primer
gtaagcggtgtagaattgcgtatt

SEQ ID NO: 180 - DNA, 20 bp, Artificial Sequence
  Description of Artificial Sequence: Synthetic primer
aaggtcaagaacgttggcat

SEQ ID NO: 181 - DNA, 23 bp, Artificial Sequence
  Description of Artificial Sequence: Synthetic primer
aagcatttaatagaacagcatcg

SEQ ID NO: 182 - DNA, 22 bp, Artificial Sequence
  Description of Artificial Sequence: Synthetic primer
tatgcgcctgtgaacattctct

SEQ ID NO: 183 - DNA, 5886 bp, Artificial Sequence
  Description of Artificial Sequence: Synthetic polynucleotide
acggattagaagccgccgagcgggtgacagccctccgaaggaagactctcctccgtgcgtcctcgtcttcaccggtcgcgttcctgaaacgcagatgtgcctcgcgccgcactgctccgaacaataaagattctacaatactagcttttatggttatgaagaggaaaaattggcagtaacctggccccacaaaccttcaaatgaacgaatcaaattaacaaccataggatgataatgcgattagttttttagccttatttctggggtaattaatcagcgaagcgatgatttttgatctattaacagatatataaatgcaaaaactgcataaccactttaactaatactttcaacattttcggtttgtattacttcttattcaaatgtaataaaagtatcaacaaaaaattgttaatatacctctatactttaacgtcaaggagaaaaaaccccggatcggactactagcagctgtaatacgactcactatagggaatattaagctcgcccttaagggcgagcttcgaggtcacccattcgaaggtaagcctatccctaaccctctcctcggtctcgattctacgcgtaccggtcatcatcaccatcaccattgagtttctagagggccgcatcatgtaattagttatgtcacgcttacattcacgccctccccccacatccgctctaaccgaaaaggaaggagttagacaacctgaagtctaggtccctatttatttttttatagttatgttagtattaagaacgttatttatatttcaaatttttcttttttttctgtacagacgcgtgtacgcatgtaacattatactgaaaaccttgcttgagaaggttttgggacgctcgaaggctttaatttgcaagctgcggccctgcattaatgaatcggccaacgcgcggggagaggcggtttgcgtattgggcgctcttccgcttcctcgctcactgactcgctgcgctcggtcgttcggctgcggcgagcggtatcagctcactcaaaggcggtaatacggttatccacagaatcaggggataacgcaggaaagaacatgtgagcaaaaggccagcaaaagcccaggaaccgtaaaaaggccgcgttgctggcgtttttccataggctccgcccccctgacgagcatcacaaaaatcgacgctcaagtcagaggtggcgaaacccgacaggactataaagataccaggcgtttccccctggaagctccctcgtgcgctctcctgttccgaccctgccgcttaccggatacctgtccgcctttctcccttcgggaagcgtggcgctttctcatagctcacgctgtaggtatctcagttcggtgtaggtcgttcgctccaagctgggctgtgtgcacgaaccccccgttcagcccgaccgctgcgccttatccggtaactatcgtcttgagtccaacccggtaagacacgacttatcgccactggcagcagccactggtaacaggattagcagagcgaggtatgtaggcggtgctacagagttcttgaagtggtggcctaactacggctacactagaaggacagtatttggtatctgcgctctgctgaagccagttaccttcggaaaaagagttggtagctcttgatccggcaaacaaaccaccgctggtagcggtggtttttttgtttgcaagcagcagattacgcgcagaaaaaaaggatctcaagaagatcctttgatcttttctacggggtctgacgctcagtggaacgaaaactcacgttaagggattttggtcatgagattatcaaaaaggatcttcacctagatccttttaaattaaaaatgaagttttaaatcaatctaaagtatatatgagtaaacttggtctgacagttaccaatgcttaatcagtgaggcacctatctcagcgatctgtctatttcgttcatccatagttgcctgactccccgtcgtgtagataactacgatacgggagcgcttaccatctggccccagtgctgcaatgataccgcgagacccacgctcaccggctccagatttatcagcaataaaccagccagccggaagggccgagcgcagaagtggtcctgcaactttatccgcctccattcagtctattaattgttgccgggaagctagagtaagtagttcgccagttaatagtttgcgcaacgttgttggcattgctacaggcatcgtggtgtcactctcgtcgtttggtatggcttcattcagctccggttcccaacgatcaaggcgagttacatgatcccccatgttgtgcaaaaaagcggttagctccttcggtcctccgatcgttgtcagaagtaagttggccgcagtgttatcactcatggttatggcagcactgcataattctcttactgtcatgccatccgtaagatgcttttctgtgactggtgagtactcaaccaagtcattctgagaatagtgtatgcggcgaccgagttgctcttgcccggcgtcaatacgggataatagtgtatcacatagcagaactttaaaagtgctcatcattggaaaacgttcttcggggcgaaaactctcaaggatcttaccgctgttgagatccagttcgatgtaacccactcgtgcacccaactgatcttcagcatcttttactttcaccagcgtttctgggtgagcaaaaacaggaaggcaaaatgccgcaaaaaagggaataagggcgacacggaaatgttgaatactcatactcttcctttttcaatgggtaataactgatataattaaattgaagctctaatttgtgagtttagtatacatgcatttacttataatacagttttttagttttgctggccgcatcttctcaaatatgcttcccagcctgcttttctgtaacgttcaccctctaccttagcatcccttccctttgcaaatagtcctcttccaacaataataatgtcagatcctgtagagaccacatcatccacggttctatactgttgacccaatgcgtctcccttgtcatctaaacccacaccgggtgtcataatcaaccaatcgtaaccttcatctcttccacccatgtctctttgagcaataaagccgataacaaaatctttgtcgctcttcgcaatgtcaacagtacccttagtatattctccagtagatagggagcccttgcatgacaattctgctaacatcaaaaggcctctaggttcctttgttacttcttctgccgcctgcttcaaaccgctaacaatacctgggcccaccacaccgtgtgcattcgtaatgtctgcccattctgctattctgtatacacccgcagagtactgcaatttgactgtattaccaatgtcagcaaattttctgtcttcgaagagtaaaaaattgtacttggcggataatgcctttagcggcttaactgtgccctccatggaaaaatcagtcaagatatccacatgtgtttttagtaaacaaattttgggacctaatgcttcaactaactccagtaattccttggtggtacgaacatccaatgaagcacacaagtttgtttgcttttcgtgcatgatattaaatagcttggcagcaacaggactaggatgagtagcagcacgttccttatatgtagctttcgacatgatttatcttcgtttcctgcaggtttttgttctgtgcagttgggttaagaatactgggcaatttcatgtttcttcaacactacatatgcgtatatataccaatctaagtctgtgctccttccttcgttcttccttctgttcggagattaccgaatcaaaaaaatttcaaagaaaccgaaatcaaaaaaaagaataaaaaaaaaatgatgaattgaattgaaaagctagcttatcgatgataagctgtcaaagatgagaattaattccacggactatagactatactagatactccgtctactgtacgatacacttccgctcaggtccttgtcctttaacgaggccttaccactcttttgttactctattgatccagctcagcaaaggcagtgtgatctaagattctatcttcgcgatgtagtaaaactagctagaccgagaaagagactagaaatgcaaaaggcacttctacaatggctgccatcattattatccgatgtgacgctgcagcttctcaatgatattcgaatacgctttgaggagatacagcctaatatccgacaaactgttttacagatttacgatcgtacttgttacccatcattgaattttgaacatccgaacctgggagttttccctgaaacagatagtatatttgaacctgtataataatatatagtctagcgctttacggaagacaatgtatgtatttcggttcctggagaaactattgcatctattgcataggtaatcttgcacgtcgcatccccggttcattttctgcgtttccatcttgcacttcaatagcatatctttgttaacgaagcatctgtgcttcattttgtagaacaaaaatgcaacgcgagagcgctaatttttcaaacaaagaatctgagctgcatttttacagaacagaaatgcaacgcgaaagcgctattttaccaacgaagaatctgtgcttcatttttgtaaaacaaaaatgcaacgcgacgagagcgctaatttttcaaacaaagaatctgagctgcatttttacagaacagaaatgcaacgcgagagcgctattttaccaacaaagaatctatacttcttttttgttctacaaaaatgcatcccgagagcgctatttttctaacaaagcatcttagattactttttttctcctttgtgcgctctataatgcagtctcttgataactttttgcactgtaggtccgttaaggttagaagaaggctactttggtgtctattttctcttccataaaaaaagcctgactccacttcccgcgtttactgattactagcgaagctgcgggtgcattttttcaagataaaggcatccccgattatattctataccgatgtggattgcgcatactttgtgaacagaaagtgatagcgttgatgattcttcattggtcagaaaattatgaacggtttcttctattttgtctctatatactacgtataggaaatgtttacattttcgtattgttttcgattcactctatgaatagttcttactacaatttttttgtctaaagagtaatactagagataaacataaaaaatgtagaggtcgagtttagatgcaagttcaaggagcgaaaggtggatgggtaggttatatagggatatagcacagagatatatagcaaagagatacttttgagcaatgtttgtggaagcggtattcgcaatgggaagctccaccccggttgataatcagaaaagccccaaaaacaggaagattgtataagcaaatatttaaattgtaaacgttaatattttgttaaaattcgcgttaaatttttgttaaatcagctcattttttaacgaatagcccgaaatcggcaaaatcccttataaatcaaaagaatagaccgagatagggttgagtgttgttccagtttccaacaagagtccactattaaagaacgtggactccaacgtcaaagggcgaaaaagggtctatcagggcgatggcccactacgtgaaccatcaccctaatcaagttttttggggtcgaggtgccgtaaagcagtaaatcggaagggtaaacggatgcccccatttagagcttgacggggaaagccggcgaacgtggcgagaaaggaagggaagaaagcgaaaggagcgggggctagggcggtgggaagtgtaggggtcacgctgggcgtaaccaccacacccgccgcgcttaatggggcgctacagggcgcgtggggatgatccactagt

SEQ ID NO: 184 - DNA, 5797 bp, Artificial Sequence
  Description of Artificial Sequence: Synthetic polynucleotide
tcgcgcgtttcggtgatgacggtgaaaacctctgacacatgcagctcccggagacggtcacagcttgtctgtaagcggatgccgggagcagacaagcccgtcagggcgcgtcagcgggtgttggcgggtgtcggggctggcttaactatgcggcatcagagcagattgtactgagagtgcaccataaattcccgttttaagagcttggtgagcgctaggagtcactgccaggtatcgtttgaacacggcattagtcagggaagtcataacacagtcctttcccgcaattttctttttctattactcttggcctcctctagtacactctatatttttttatgcctcggtaatgattttcatttttttttttcccctagcggatgactctttttttttcttagcgattggcattatcacataatgaattatacattatataaagtaatgtgatttcttcgaagaatatactaaaaaatgagcaggcaagataaacgaaggcaaagatgacagagcagaaagccctagtaaagcgtattacaaatgaaaccaagattcagattgcgatctctttaaagggtggtcccctagcgatagagcactcgatcttcccagaaaaagaggcagaagcagtagcagaacaggccacacaatcgcaagtgattaacgtccacacaggtatagggtttctggaccatatgatacatgctctggccaagcattccggctggtcgctaatcgttgagtgcattggtgacttacacatagacgaccatcacaccactgaagactgcgggattgctctcggtcaagcttttaaagaggccctactggcgcgtggagtaaaaaggtttggatcaggatttgcgcctttggatgaggcactttccagagcggtggtagatctttcgaacaggccgtacgcagttgtcgaacttggtttgcaaagggagaaagtaggagatctctcttgcgagatgatcccgcattttcttgaaagctttgcagaggctagcagaattaccctccacgttgattgtctgcgaggcaagaatgatcatcaccgtagtgagagtgcgttcaaggctcttgcggttgccataagagaagccacctcgcccaatggtaccaacgatgttccctccaccaaaggtgttcttatgtagtgacaccgattatttaaagctgcagcatacgatatatatacatgtgtatatatgtatacctatgaatgtcagtaagtatgtatacgaacagtatgatactgaagatgacaaggtaatgcatcattctatacgtgtcattctgaacgaggcgcgctttccttttttctttttgctttttctttttttttctcttgaactcgacggatctatgcggtgtgaaataccgcacagatgcgtaaggagaaaataccgcatcaggaaattgtaaacgttaatattttgttaaaattcgcgttaaatttttgttaaatcagctcattttttaaccaataggccgaaatcggcaaaatcccttataaatcaaaagaatagaccgagatagggttgagtgttgttccagtttggaacaagagtccactattaaagaacgtggactccaacgtcaaagggcgaaaaaccgtctatcagggcgatggcccactacgtgaaccatcaccctaatcaagttttttggggtcgaggtgccgtaaagcactaaatcggaaccctaaagggagcccccgatttagagcttgacggggaaagccggcgaacgtggcgagaaaggaagggaagaaagcgaaaggagcgggcgctagggcgctggcaagtgtagcggtcacgctgcgcgtaaccaccacacccgccgcgcttaatgcgccgctacagggcgcgtcgcgccattcgccattcaggctgcgcaactgttgggaagggcgatcggtgcgggcctcttcgctattacgccagctggcgaaagggggatgtgctgcaaggcgattaagttgggtaacgccagggttttcccagtcacgacgttgtaaaacgacggccagtgagcgcgcgtaatacgactcactatagggcgaattgggtaccgggccccccctcgaggtcgacggtatcgataagcttgatatcgaattcctgcagcccgggggatccactagttctagagcggccgccaccgcggtggagctccagcttttgttccctttagtgagggttaattgcgcgcttggcgtaatcatggtcatagctgtttcctgtgtgaaattgttatccgctcacaattccacacaacataggagccggaagcataaagtgtaaagcctggggtgcctaatgagtgaggtaactcacattaattgcgttgcgctcactgcccgctttccagtcgggaaacctgtcgtgccagctgcattaatgaatcggccaacgcgcggggagaggcggtttgcgtattgggcgctcttccgcttcctcgctcactgactcgctgcgctcggtcgttcggctgcggcgagcggtatcagctcactcaaaggcggtaatacggttatccacagaatcaggggataacgcaggaaagaacatgtgagcaaaaggccagcaaaaggccaggaaccgtaaaaaggccgcgttgctggcgtttttccataggctccgcccccctgacgagcatcacaaaaatcgacgctcaagtcagaggtggcgaaacccgacaggactataaagataccaggcgtttccccctggaagctccctcgtgcgctctcctgttccgaccctgccgcttaccggatacctgtccgcctttctcccttcgggaagcgtggcgctttctcatagctcacgctgtaggtatctcagttcggtgtaggtcgttcgctccaagctgggctgtgtgcacgaaccccccgttcagcccgaccgctgcgccttatccggtaactatcgtcttgagtccaacccggtaagacacgacttatcgccactggcagcagccactggtaacaggattagcagagcgaggtatgtaggcggtgctacagagttcttgaagtggtggcctaactacggctacactagaaggacagtatttggtatctgcgctctgctgaagccagttaccttcggaaaaagagttggtagctcttgatccggcaaacaaaccaccgctggtagcggtggtttttttgtttgcaagcagcagattacgcgcagaaaaaaaggatctcaagaagatcctttgatcttttctacggggtctgacgctcagtggaacgaaaactcacgttaagggattttggtcatgagattatcaaaaaggatcttcacctagatccttttaaattaaaaatgaagttttaaatcaatctaaagtatatatgagtaaacttggtctgacagttaccaatgcttaatcagtgaggcacctatctcagcgatctgtctatttcgttcatccatagttgcctgactccccgtcgtgtagataactacgatacgggagggcttaccatctggccccagtgctgcaatgataccgcgagacccacgctcaccggctccagatttatcagcaataaaccagccagccggaagggccgagcgcagaagtggtcctgcaactttatccgcctccatccagtctattaattgttgccgggaagctagagtaagtagttcgccagttaatagtttgcgcaacgttgttgccattgctacaggcatcgtggtgtcacgctcgtcgtttggtatggcttcattcagctccggttcccaacgatcaaggcgagttacatgatcccccatgttgtgcaaaaaagcggttagctccttcggtcctccgatcgttgtcagaagtaagttggccgcagtgttatcactcatggttatggcagcactgcataattctcttactgtcatgccatccgtaagatgcttttctgtgactggtgagtactcaaccaagtcattctgagaatagtgtatgcggcgaccgagttgctcttgcccggcgtcaatacgggataataccgcgccacatagcagaactttaaaagtgctcatcattggaaaacgttcttcggggcgaaaactctcaaggatcttaccgctgttgagatccagttcgatgtaacccactcgtgcacccaactgatcttcagcatcttttactttcaccagcgtttctgggtgagcaaaaacaggaaggcaaaatgccgcaaaaaagggaataagggcgacacggaaatgttgaatactcatactcttcctttttcaatattattgaagcatttatcagggttattgtctcatgagcggatacatatttgaatgtatttagaaaaataaacaaataggggttccgcgcacatttccccgaaaagtgccacctgaacgaagcatctgtgcttcattttgtagaacaaaaatgcaacgcgagagcgctaatttttcaaacaaagaatctgagctgcatttttacagaacagaaatgcaacgcgaaagcgctattttaccaacgaagaatctgtgcttcatttttgtaaaacaaaaatgcaacgcgagagcgctaatttttcaaacaaagaatctgagctgcatttttacagaacagaaatgcaacgcgagagcgctattttaccaacaaagaatctatacttcttttttgttctacaaaaatgcatcccgagagcgctatttttctaacaaagcatcttagattactttttttctcctttgtgcgctctataatgcagtctcttgataactttttgcactgtaggtccgttaaggttagaagaaggctactttggtgtctattttctcttccataaaaaaagcctgactccacttcccgcgtttactgattactagcgaagctgcgggtgcattttttcaagataaaggcatccccgattatattctataccgatgtggattgcgcatactttgtgaacagaaagtgatagcgttgatgattcttcattggtcagaaaattatgaacggtttcttctattttgtctctatatactacgtataggaaatgtttacattttcgtattgttttcgattcactctatgaatagttcttactacaatttttttgtctaaagagtaatactagagataaacataaaaaatgtagaggtcgagtttagatgcaagttcaaggagcgaaaggtggatgggtaggttatatagggatatagcacagagatatatagcaaagagatacttttgagcaatgtttgtggaagcggtattcgcaatattttagtagctcgttacagtccggtgcgtttttggttttttgaaagtgcgtcttcagagcgcttttggttttcaaaagcgctctgaagttcctatactttctagagaataggaacttcggaataggaacttcaaagcgtttccgaaaacgagcgcttccgaaaatgcaacgcgagctgcgcacatacagctcactgttcacgtcgcacctatatctgcgtgttgcctgtatatatatatacatgagaagaacggcatagtgcgtgtttatgcttaaatgcgtacttatatgcgtctatttatgtaggatgaaaggtagtctagtacctcctgtgatattatcccattccatgcggggtatcgtatgcttccttcagcactaccctttagctgttctatatgctgccactcctcaattggattagtctcatccttcaatgctatcatttcctttgatattggatcatctaagaaaccattattatcatgacattaacctataaaaataggcgtatcacgaggccctttcgtc

SEQ ID NO: 185 - DNA, 6849 bp, Artificial Sequence
  Description of Artificial Sequence: Synthetic polynucleotide
tcgcgcgtttcggtgatgacggtgaaaacctctgacacatgcagctcccggagacggtcacagcttgtctgtaagcggatgccgggagcagacaagcccgtcagggcgcgtcagcgggtgttggcgggtgtcggggctggcttaactatgcggcatcagagcagattgtactgagagtgcaccatatcgactacgtcgtaaggccgtttctgacagagtaaaattcttgagggaactttcaccattatgggaaatgcttcaagaaggtattgacttaaactccatcaaatggtcaggtcattgagtgttttttatttgttgtatttttttttttttagagaaaatcctccaatatcaaattaggaatcgtagtttcatgattttctgttacacctaactttttgtgtggtgccctcctccttgtcaatattaatgttaaagtgcaattctttttccttatcacgttgagccattagtatcaatttgcttacctgtattcctttactatcctcctttttctccttcttgataaatgtatgtagattgcgtatatagtttcgtctaccctatgaacatattccattttgtaatttcgtgtcgtttctattatgaatttcatttataaagtttatgtacaaatatcataaaaaaagagaatctttttaagcaaggattttcttaacttcttcggcgacagcatcaccgacttcggtggtactgttggaaccacctaaatcaccagttctgatacctgcatccaaaacctttttaactgcatcttcaatggccttaccttcttcaggcaagttcaatgacaatttcaacatcattgcagcagacaagatagtggcgatagggtcaaccttattctttggcaaatctggagcagaaccgtggcatggttcgtacaaaccaaatgcggtgttcttgtctggcaaagaggccaaggacgcagatggcaacaaacccaaggaacctgggataacggaggcttcatcggagatgatatcaccaaacatgttgctggtgattataataccatttaggtgggttgggttcttaactaggatcatggcggcagaatcaatcaattgatgttgaaccttcaatgtagggaattcgttcttgatggtttcctccacagtttttctccataatcttgaagaggccaaaagattagctttatccaaggaccaaataggcaatggtggctcatgttgtagggccatgaaagcggccattcttgtgattctttgcacttctggaacggtgtattgttcactatcccaagcgacaccatcaccatcgtcttcctttctcttaccaaagtaaatacctcccactaattctctgacaacaacgaagtcagtacctttagcaaattgtggcttgattggagataagtctaaaagagagtcggatgcaaagttacatggtcttaagttggcgtacaattgaagttctttacggatttttagtaaaccttgttcaggtctaacactaccggtaccccatttaggaccagccacagcacctaacaaaacggcatcaaccttcttggaggcttccagcgcctcatctggaagtgggacacctgtagcatcgatagcagcaccaccaattaaatgattttcgaaatcgaacttgacattggaacgaacatcagaaatagctttaagaaccttaatggcttcggctgtgatttcttgaccaacgtggtcacctggcaaaacgacgatcttcttaggggcagacataggggcagacattagaatggtatatccttgaaatatatatatatattgctgaaatgtaaaaggtaagaaaagttagaaagtaagacgattgctaaccacctattggaaaaaacaataggtccttaaataatattgtcaacttcaagtattgtgatgcaagcatttagtcatgaacgcttctctattctatatgaaaagccggttccggcctctcacctttcctttttctcccaatttttcagttgaaaaaggtatatgcgtcaggcgacctctgaaattaacaaaaaatttccagtcatcgaatttgattctgtgcgatagcgcccctgtgtgttctcgttatgttgaggaaaaaaataatggttgctaagagattcgaactcttgcatcttacgatacctgagtattcccacagttaactgcggtcaagatatttcttgaatcaggcgccttagaccgctcggccaaacaaccaattacttgttgagaaatagagtataattatcctataaatataacgtttttgaacacacatgaacaaggaagtacaggacaattgattttgaagagaatgtggattttgatgtaattgttgggattccatttttaataaggcaataatattaggtatgtggatatactagaagttctcctcgaccgtcgatatgcggtgtgaaataccgcacagatgcgtaaggagaaaataccgcatcaggaaattgtaaacgttaatattttgttaaaattcgcgttaaatttttgttaaatcagctcattttttaaccaataggccgaaatcggcaaaatcccttataaatcaaaagaatagaccgagatagggttgagtgttgttccagtttggaacaagagtccactattaaagaacgtggactccaacgtcaaagggcgaaaaaccgtctatcagggcgatggcccactacgtgaaccatcaccctaatcaagttttttggggtcgaggtgccgtaaagcactaaatcggaaccctaaagggagcccccgatttagagcttgacggggaaagccggcgaacgtggcgagaaaggaagggaagaaagcgaaaggagcgggcgctagggcgctggcaagtgtagcggtcacgctgcgcgtaaccaccacacccgccgcgcttaatgcgccgctacagggcgcgtcgcgccattcgccattcaggctgcgcaactgttgggaagggcgatcggtgcgggcctcttcgctattacgccagctggcgaaagggggatgtgctgcaaggcgattaagttgggtaacgccagggttttcccagtcacgacgttgtaaaacgacggccagtgagcgcgcgtaatacgactcactatagggcgaattgggtaccgggccccccctcgaggtcgacggtatcgataagcttgatatcgaattcctgcagcccgggggatccactagttctagagcggccgccaccgcggtggagctccagcttttgttccctttagtgagggttaattgcgcgcttggcgtaatcatggtcatagctgtttcctgtgtgaaattgttatccgctcacaattccacacaacataggagccggaagcataaagtgtaaagcctggggtgcctaatgagtgaggtaactcacattaattgcgttgcgctcactgcccgctttccagtcgggaaacctgtcgtgccagctgcattaatgaatcggccaacgcgcggggagaggcggtttgcgtattgggcgctcttccgcttcctcgctcactgactcgctgcgctcggtcgttcggctgcggcgagcggtatcagctcactcaaaggcggtaatacggttatccacagaatcaggggataacgcaggaaagaacatgtgagcaaaaggccagcaaaaggccaggaaccgtaaaaaggccgcgttgctggcgtttttccataggctccgcccccctgacgagcatcacaaaaatcgacgctcaagtcagaggtggcgaaacccgacaggactataaagataccaggcgtttccccctggaagctccctcgtgcgctctcctgttccgaccctgccgcttaccggatacctgtccgcctttctcccttcgggaagcgtggcgctttctcatagctcacgctgtaggtatctcagttcggtgtaggtcgttcgctccaagctgggctgtgtgcacgaaccccccgttcagcccgaccgctgcgccttatccggtaactatcgtcttgagtccaacccggtaagacacgacttatcgccactggcagcagccactggtaacaggattagcagagcgaggtatgtaggcggtgctacagagttcttgaagtggtggcctaactacggctacactagaaggacagtatttggtatctgcgctctgctgaagccagttaccttcggaaaaagagttggtagctcttgatccggcaaacaaaccaccgctggtagcggtggtttttttgtttgcaagcagcagattacgcgcagaaaaaaaggatctcaagaagatcctttgatcttttctacggggtctgacgctcagtggaacgaaaactcacgttaagggattttggtcatgagattatcaaaaaggatcttcacctagatccttttaaattaaaaatgaagttttaaatcaatctaaagtatatatgagtaaacttggtctgacagttaccaatgcttaatcagtgaggcacctatctcagcgatctgtctatttcgttcatccatagttgcctgactccccgtcgtgtagataactacgatacgggagggcttaccatctggccccagtgctgcaatgataccgcgagacccacgctcaccggctccagatttatcagcaataaaccagccagccggaagggccgagcgcagaagtggtcctgcaactttatccgcctccatccagtctattaattgttgccgggaagctagagtaagtagttcgccagttaatagtttgcgcaacgttgttgccattgctacaggcatcgtggtgtcacgctcgtcgtttggtatggcttcattcagctccggttcccaacgatcaaggcgagttacatgatcccccatgttgtgcaaaaaagcggttagctccttcggtcctccgatcgttgtcagaagtaagttggccgcagtgttatcactcatggttatggcagcactgcataattctcttactgtcatgccatccgtaagatgcttttctgtgactggtgagtactcaaccaagtcattctgagaatagtgtatgcggcgaccgagttgctcttgcccggcgtcaatacgggataataccgcgccacatagcagaactttaaaagtgctcatcattggaaaacgttcttcggggcgaaaactctcaaggatcttaccgctgttgagatccagttcgatgtaacccactcgtgcacccaactgatcttcagcatcttttactttcaccagcgtttctgggtgagcaaaaacaggaaggcaaaatgccgcaaaaaagggaataagggcgacacggaaatgttgaatactcatactcttcctttttcaatattattgaagcatttatcagggttattgtctcatgagcggatacatatttgaatgtatttagaaaaataaacaaataggggttccgcgcacatttccccgaaaagtgccacctgaacgaagcatctgtgcttcattttgtagaacaaaaatgcaacgcgagagcgctaatttttcaaacaaagaatctgagctgcatttttacagaacagaaatgcaacgcgaaagcgctattttaccaacgaagaatctgtgcttcatttttgtaaaacaaaaatgcaacgcgagagcgctaatttttcaaacaaagaatctgagctgcatttttacagaacagaaatgcaacgcgagagcgctattttaccaacaaagaatctatacttcttttttgttctacaaaaatgcatcccgagagcgctatttttctaacaaagcatcttagattactttttttctcctttgtgcgctctataatgcagtctcttgataactttttgcactgtaggtccgttaaggttagaagaaggctactttggtgtctattttctcttccataaaaaaagcctgactccacttcccgcgtttactgattactagcgaagctgcgggtgcattttttcaagataaaggcatccccgattatattctataccgatgtggattgcgcatactttgtgaacagaaagtgatagcgttgatgattcttcattggtcagaaaattatgaacggtttcttctattttgtctctatatactacgtataggaaatgtttacattttcgtattgttttcgattcactctatgaatagttcttactacaatttttttgtctaaagagtaatactagagataaacataaaaaatgtagaggtcgagtttagatgcaagttcaaggagcgaaaggtggatgggtaggttatatagggatatagcacagagatatatagcaaagagatacttttgagcaatgtttgtggaagcggtattcgcaatattttagtagctcgttacagtccggtgcgtttttggttttttgaaagtgcgtcttcagagcgcttttggttttcaaaagcgctctgaagttcctatactttctagagaataggaacttcggaataggaacttcaaagcgtttccgaaaacgagcgcttccgaaaatgcaacgcgagctgcgcacatacagctcactgttcacgtcgcacctatatctgcgtgttgcctgtatatatatatacatgagaagaacggcatagtgcgtgtttatgcttaaatgcgtacttatatgcgtctatttatgtaggatgaaaggtagtctagtacctcctgtgatattatcccattccatgcggggtatcgtatgcttccttcagcactaccctttagctgttctatatgctgccactcctcaattggattagtctcatccttcaatgctatcatttcctttgatattggatcatactaagaaaccattattatcatgacattaacctataaaaataggcgtatcacgaggccctttcgtc

SEQ ID NO: 186 - DNA, 1937 bp, Artificial Sequence
  Description of Artificial Sequence: Synthetic polynucleotide
acagctgtcagcgctaaaagatgcctggcagttccctactctcgccgctgcgctcggtcgttcggctgcgggacctcagcgctagcggagtgtatactggcttactatgttggcactgatgagggtgtcagtgaagtgcttcatgtggcaggagaaaaaaggctgcaccggtgcgtcagcagaatatgtgatacaggatatattccgcttcctcgctcactgactcgctacgctcggtcgttcgactgcggcgagcggaaatggcttacgaacggggcggagatttcctggaagatgccaggaagatacttaacagggaagtgagagggccgcggcaaagccgtttttccataggctccgcccccctgacaagcatcacgaaatctgacgctcaaatcagtggtggcgaaacccgacaggactataaagataccaggcgtttccccctggcggctccctcgtgcgctctcctgttcctgcctttcggtttaccggtgtcattccgctgttatggccgcgtttgtctcattccacgcctgacactcagttccgggtaggcagttcgctccaagctggactgtatgcacgaaccccccgttcagtccgaccgctgcgccttatccggtaactatcgtcttgagtccaacccggaaagacatgcaaaagcaccactggcagcagccactggtaattgatttagaggagttagtcttgaagtcatgcgccggttaaggctaaactgaaaggacaagttttggtgactgcgctcctccaagccagttacctcggttcaaagagttggtagctcagagaaccttcgaaaaaccgccctgcaaggcggttttttcgttttcagagcaagagattacgcgcagaccaaaacgatctcaagaagatcatcttattaagcttagaaaaactcatcgagcatcaaatgaaactgcaatttattcatatcaggattatcaataccatatttttgaaaaagccgtttctgtaatgaaggagaaaactcaccgaggcagttccataggatggcaagatcctggtatcggtctgcgattccgactcgtccaacatcaatacaacctattaatttcccctcgtcaaaaataaggttatcaagtgagaaatcaccatgagtgacgactgaatccggtgagaatggcaaaagtttatgcatttctttccagacttgttcaacaggccagccattacgctcgtcatcaaaatcactcgcatcaaccaaaccgttattcattcgtgattgcgcctgagcgaggcgaaatacgcgatcgctgttaaaaggacaattacaaacaggaatcgagtgcaaccggcgcaggaacactgccagcgcatcaacaatattttcacctgaatcaggatattcttctaatacctggaacgctgtttttccggggatcgcagtggtgagtaaccatgcatcatcaggagtacggataaaatgcttgatggtcggaagtggcataaattccgtcagccagtttagtctgaccatctcatctgtaacatcattggcaacgctacctttgccatgtttcagaaacaactctggcgcatcgggcttcccatacaagcgatagattgtcgcacctgattgcccgacattatcgcgagcccatttatacccatataaatcagcatccatgttggaatttaatcgcggcctcgacgtttcccgttgaatatggctcatattcttcctttttcaatattattgaagcatttatcagggttattgtctcatgagcggatacatatttgaatgtatttagaaaaataaacaaataggggtcagtgttacaaccaattaaccaattctgaacattatcgcgagcccatttatacctgaatatggctcataacaccccttgcagtgcgactaacggcatgaagctcgtcggggagcgctg

SEQ ID NO: 187 - DNA, 87 bp, Artificial Sequence
  Description of Artificial Sequence: Synthetic primer
aattcgtggaagaaaggggagttgaagccggcattacgcgatttcatcgccattgtgcaggaacgtttggcaagcgtaacggcataa

SEQ ID NO: 188 - DNA, 87 bp, Artificial Sequence
  Description of Artificial Sequence: Synthetic primer
agctttatgccgttacgcttgccaaacgttcctgcacaatggcgatgaaatcgcgtaatgccggcttcaactcccctttcttccacg

SEQ ID NO: 189 - DNA, 8251 bp, Artificial Sequence
  Description of Artificial Sequence: Synthetic polynucleotide
ttcgctagcaggagctaaggaagctaaaatgtccggtacgggtcgtttggctggtaaaattgcattgatcaccggtggtgctggtaacattggttccgagctgacccgccgttttctggccgagggtgcgacggttattatcagcggccgtaaccgtgcgaagctgaccgcgctggccgagcgcatgcaagccgaggccggcgtgccggccaagcgcattgatttggaggtgatggatggttccgaccctgtggctgtccgtgccggtatcgaggcaatcgtcgctcgccacggtcagattgacattctggttaacaacgcgggctccgccggtgcccaacgtcgcttggcggaaattccgctgacggaggcagaattgggtccgggtgcggaggagactttgcacgcttcgatcgcgaatctgttgggcatgggttggcacctgatgcgtattgcggctccgcacatgccagttggctccgcagttatcaacgtttcgactattttctcgcgcgcagagtactatggtcgcattccgtacgttaccccgaaggcagcgctgaacgctttgtcccagctggctgcccgcgagctgggcgctcgtggcatccgcgttaacactattttcccaggtcctattgagtccgaccgcatccgtaccgtgtttcaacgtatggatcaactgaagggtcgcccggagggcgacaccgcccatcactttttgaacaccatgcgcctgtgccgcgcaaacgaccaaggcgctttggaacgccgctttccgtccgttggcgatgttgctgatgcggctgtgtttctggcttctgctgagagcgcggcactgtcgggtgagacgattgaggtcacccacggtatggaactgccggcgtgtagcgaaacctccttgttggcgcgtaccgatctgcgtaccatcgacgcgagcggtcgcactaccctgatttgcgctggcgatcaaattgaagaagttatggccctgacgggcatgctgcgtacgtgcggtagcgaagtgattatcggcttccgttctgcggctgccctggcgcaatttgagcaggcagtgaatgaatctcgccgtctggcaggtgcggatttcaccccgccgatcgctttgccgttggacccacgtgacccggccaccattgatgcggttttcgattggggcgcaggcgagaatacgggtggcatccatgcggcggtcattctgccggcaacctcccacgaaccggctccgtgcgtgattgaagtcgatgacgaacgcgtcctgaatttcctggccgatgaaattaccggcaccatcgttattgcgagccgtttggcgcgctattggcaatcccaacgcctgaccccgggtgcccgtgcccgcggtccgcgtgttatctttctgagcaacggtgccgatcaaaatggtaatgtttacggtcgtattcaatctgcggcgatcggtcaattgattcgcgtttggcgtcacgaggcggagttggactatcaacgtgcatccgccgcaggcgatcacgttctgccgccggtttgggcgaaccagattgtccgtttcgctaaccgctccctggaaggtctggagttcgcgtgcgcgtggaccgcacagctgctgcacagccaacgtcatattaacgaaattacgctgaacattccagccaatattagcgcgaccacgggcgcacgttccgccagcgtcggctgggccgagtccttgattggtctgcacctgggcaaggtggctctgattaccggtggttcggcgggcatcggtggtcaaatcggtcgtctgctggccttgtctggcgcgcgtgtgatgctggccgctcgcgatcgccataaattggaacagatgcaagccatgattcaaagcgaattggcggaggttggttataccgatgtggaggaccgtgtgcacatcgctccgggttgcgatgtgagcagcgaggcgcagctggcagatctggtggaacgtacgctgtccgcattcggtaccgtggattatttgattaataacgccggtattgcgggcgtggaggagatggtgatcgacatgccggtggaaggctggcgtcacaccctgtttgccaacctgatttcgaattattcgctgatgcgcaagttggcgccgctgatgaagaagcaaggtagcggttacatcctgaacgtttcttcctattttggcggtgagaaggacgcggcgattccttatccgaaccgcgccgactacgccgtctccaaggctggccaacgcgcgatggcggaagtgttcgctcgtttcctgggtccagagattcagatcaatgctattgccccaggtccggttgaaggcgaccgcctgcgtggtaccggtgagcgtccgggcctgtttgctcgtcgcgcccgtctgatcttggagaataaacgcctgaacgaattgcacgcggctttgattgctgcggcccgcaccgatgagcgctcgatgcacgagttggttgaattgttgctgccgaacgacgtggccgcgttggagcagaacccagcggcccctaccgcgctgcgtgagctggcacgccgcttccgtagcgaaggtgatccggcggcaagctcctcgtccgccttgctgaatcgctccatcgctgccaagctgttggctcgcttgcataacggtggctatgtgctgccggcggatatttttgcaaatctgcctaatccgccggacccgttctttacccgtgcgcaaattgaccgcgaagctcgcaaggtgcgtgatggtattatgggtatgctgtatctgcagcgtatgccaaccgagtttgacgtcgctatggcaaccgtgtactatctggccgatcgtaacgtgagcggcgaaactttccatccgtctggtggtttgcgctacgagcgtaccccgaccggtggcgagctgttcggcctgccatcgccggaacgtctggcggagctggttggtagcacggtgtacctgatcggtgaacacctgaccgagcacctgaacctgctggctcgtgcctatttggagcgctacggtgcccgtcaagtggtgatgattgttgagacggaaaccggtgcggaaaccatgcgtcgtctgttgcatgatcacgtcgaggcaggtcgcctgatgactattgtggcaggtgatcagattgaggcagcgattgaccaagcgatcacgcgctatggccgtccgggtccggtggtgtgcactccattccgtccactgccaaccgttccgctggtcggtcgtaaagactccgattggagcaccgttttgagcgaggcggaatttgcggaactgtgtgagcatcagctgacccaccatttccgtgttgctcgtaagatcgccttgtcggatggcgcgtcgctggcgttggttaccccggaaacgactgcgactagcaccacggagcaatttgctctggcgaacttcatcaagaccaccctgcacgcgttcaccgcgaccatcggtgttgagtcggagcgcaccgcgcaacgtattctgattaaccaggttgatctgacgcgccgcgcccgtgcggaagagccgcgtgacccgcacgagcgtcagcaggaattggaacgcttcattgaagccgttctgctggttaccgctccgctgcctcctgaggcagacacgcgctacgcaggccgtattcaccgcggtcgtgcgattaccgtctaatagaagcttggctgttttggcggatgagagaagattttcagcctgatacagattaaatcagaacgcagaagcggtctgataaaacagaatttgcctggcggcagtagcgcggtggtcccacctgaccccatgccgaactcagaagtgaaacgccgtagcgccgatggtagtgtggggtctccccatgcgagagtagggaactgccaggcatcaaataaaacgaaaggctcagtcgaaagactgggcctttcgttttatctgttgtttgtcggtgaacgctctcctgagtaggacaaatccgccgggagcggatttgaacgttgcgaagcaacggcccggagggtggcgggcaggacgcccgccataaactgccaggcatcaaattaagcagaaggccatcctgacggatggcctttttgcgtttctacaaactcttttgtttatttttctaaatacattcaaatatgtatccgctcatgagacaataaccctgataaatgcttcaataatattgaaaaaggaagagtatgagtattcaacatttccgtgtcgcccttattcccttttttgcggcattttgccttcctgtttttgctcacccagaaacgctggtgaaagtaaaagatgctgaagatcagttgggtgcacgagtgggttacatcgaactggatctcaacagcggtaagatccttgagagttttcgccccgaagaacgttttccaatgatgagcacttttaaagttctgctatgtggcgcggtattatcccgtgttgacgccgggcaagagcaactcggtcgccgcatacactattctcagaatgacttggttgagtactcaccagtcacagaaaagcatcttacggatggcatgacagtaagagaattatgcagtgctgccataaccatgagtgataacactgcggccaacttacttctgacaacgatcggaggaccgaaggagctaaccgcttttttgcacaacatgggggatcatgtaactcgccttgatcgttgggaaccggagctgaatgaagccataccaaacgacgagcgtgacaccacgatgctgtagcaatggcaacaacgttgcgcaaactattaactggcgaactacttactctagcttcccggcaacaattaatagactggatggaggcggataaagttgcaggaccacttctgcgctcggcccttccggctggctggtttattgctgataaatctggagccggtgagcgtgggtctcgcggtatcattgcagcactggggccagatggtaagccctcccgtatcgtagttatctacacgacggggagtcaggcaactatggatgaacgaaatagacagatcgctgagataggtgcctcactgattaagcattggtaactgtcagaccaagtttactcatatatactttagattgatttaaaacttcatttttaatttaaaaggatctaggtgaagatcctttttgataatctcatgaccaaaatcccttaacgtgagttttcgttccactgagcgtcagaccccgtagaaaagatcaaaggatcttcttgagatcctttttttctgcgcgtaatctgctgcttgcaaacaaaaaaaccaccgctaccagcggtggtttgtttgccggatcaagagctaccaactctttttccgaaggtaactggcttcagcagagcgcagataccaaatactgtccttctagtgtagccgtagttaggccaccacttcaagaactctgtagcaccgcctacatacctcgctctgctaatcctgttaccagtggctgctgccagtggcgataagtcgtgtcttaccgggttggactcaagacgatagttaccggataaggcgcagcggtcgggctgaacggggggttcgtgcacacagcccagcttggagcgaacgacctacaccgaactgagatacctacagcgtgagcattgagaaagcgccacgcttcccgaagggagaaaggcggacaggtatccggtaagcggcagggtcggaacaggagagcgcacgagggagcttccagggggaaacgcctggtatctttatagtcctgtcgggtttcgccacctctgacttgagcgtcgatttttgtgatgctcgtcaggggggcggagcctatggaaaaacgccagcaacgcggcctttttacggttcctggccttttgctggccttttgctcacatgttctttcctgcgttatcccctgattctgtggataaccgtattaccgcctttgagtgagctgataccgctcgccgcagccgaacgaccgagcgcagcgagtcagtgagcgaggaagcggaagagcgcctgatgcggtattttctccttacgcatctgtgcggtatttcacaccgcatatggtgcactctcagtacaatctgctctgatgccgcatagttaagccagtatacactccgctatcgctacgtgactgggtcatggctgcgccccgacacccgccaacacccgctgacgcgccctgacgggcttgtctgctcccggcatccgcttacagacaagctgtgaccgtctccgggagctgcatgtgtcagaggttttcaccgtcatcaccgaaacgcgcgaggcagctgcggtaaagctcatcagcgtggtcgtgaagcgattcacagatgtctgcctgttcatccgcgtccagctcgttgagtttctccagaagcgttaatgtctggcttctgataaagcgggccatgttaagggcggttttttcctgtttggtcactgatgcctccgtgtaagggggatttctgttcatgggggtaatgataccgatgaaacgagagaggatgctcacgatacgggttactgatgatgaacatgcccggttactggaacgttgtgagggtaaacaactggcggtatggatgcggcgggaccagagaaaaatcactcagggtcaatgccagcgcttcgttaatacagatgtaggtgttccacagggtagccagcagcatcctgcgatgcagatccggaacataatggtgcagggcgctgacttccgcgtttccagactttacgaaacacggaaaccgaagaccattcatgttgttgctcaggtcgcagacgttttgcagcagcagtcgcttcacgttcgctcgcgtatcggtgattcattctgctaaccagtaaggcaaccccgccagcctagccgggtcctcaacgacaggagcacgatcatgcgcacccgtggccaggacccaacgctgcccgagatgcgccgcgtgcggctgctggagatggcggacgcgatggatatgttctgccaagggttggtttgcgcattcacagttctccgcaagaattgattggctccaattcttggagtggtgaatccgttagcgaggtgccgccggcttccattcaggtcgaggtggcccggctccatgcaccgcgacgcaacgcggggaggcagacaaggtatagggcggcgcctacaatccatgccaacccgttccatgtgctcgccgaggcggcataaatcgccgtgacgatcagcggtccagtgatcgaagttaggctggtaagagccgcgagcgatccttgaagctgtccctgatggtcgtcatctacctgcctggacagcatggcctgcaacgcgggcatcccgatgccgccggaagcgagaagaatcataatggggaaggccatccagcctcgcgtcgcgaacgccagcaagacgtagcccagcgcgtcggccgccatgccggcgataatggcctgcttctcgccgaaacgtttggtggcgggaccagtgacgaaggcttgagcgagggcgtgcaagattccgaataccgcaagcgacaggccgatcatcgtcgcgctccagcgaaagcggtcctcgccgaaaatgacccagagcgctgccggcacctgtcctacgagttgcatgataaagaagacagtcataagtgcggcgacgatagtcatgccccgcgcccaccggaaggagctgactgggttgaaggctctcaagggcatcggtcgacgctctcccttatgcgactcctgcattaggaagcagcccagtagtaggttgaggccgttgagcaccgccgccgcaaggaatggtgcatgcaaggagatggcgcccaacagtcccccggccacggggcctgccaccatacccacgccgaaacaagcgctcatgagcccgaagtggcgagcccgatcttccccatcggtgatgtcggcgatataggcgccagcaaccgcacctgtggcgccggtgatgccggccacgatgcgtccggcgtagaggatccgggcttatcgactgcacggtgcaccaatgcttctggcgtcaggcagccatcggaagctgtggtatggctgtgcaggtcgtaaatcactgcataattcgtgtcgctcaaggcgcactcccgttctggataatgttttttgcgccgacatcataacggttctggcaaatattctgaaatgagctgttgacaattaatcatcggctcgtataatgtgtggaattgtgagcggataacaatttcacacaggaaacagaa

SEQ ID NO: 190 - DNA, 966 bp, Escherichia coli
atgacaaagtatgcattagtcggtgatgtgggcggcaccaacgcacgtcttgctctgtgtgatattgccagtggtgaaatctcgcaggctaagacctattcagggcttgattaccccagcctcgaagcggtcattcgcgtttatcttgaagaacataaggtcgaggtgaaagacggctgtattgccatcgcttgcccaattaccggtgactgggtggcgatgaccaaccatacctgggcgttctcaattgccgaaatgaaaaagaatctcggttttagccatctggaaattattaacgattttaccgctgtatcgatggcgatcccgatgctgaaaaaagagcatctgattcagtttggtggcgcagaaccggtcgaaggtaagcctattgcggtttacggtgccggaacggggcttggggttgcgcatctggtccatgtcgataagcgttgggtaagcttgccaggcgaaggcggtcacgttgattttgcgccgaatagtgaagaagaggccattatcctcgaaatattgcgtgcggaaattggtcatgtttcggcggagcgcgtgctttctggccctgggctggtgaatttgtatcgcgcaattgtgaaagctgacaaccgcctgccagaaaatctcaagccaaaagatattaccgaacgcgcgctggctgacagctgcaccgattgccgccgcgcattgtcgctgttttgcgtcattatgggccgttttggcggcaatctggcgctcaatctcgggacatttggcggcgtgtttattgcgggcggtatcgtgccgcgcttccttgagttcttcaaagcctccggtttccgtgccgcatttgaagataaagggcgctttaaagaatatgtccatgatattccggtgtatctcatcgtccatgacaatccgggccttctcggttccggtgcacatttacgccagaccttaggtcacattctgtaa

SEQ ID NO: 191 - DNA, 1650 bp, Escherichia coli
atgaaaaacatcaatccaacgcagaccgctgcctggcaggcactacagaaacacttcgatgaaatgaaagacgttacgatcgccgatctttttgctaaagacggcgatcgtttttctaagttctccgcaaccttcgacgatcagatgctggtggattactccaaaaaccgcatcactgaagagacgctggcgaaattacaggatctggcgaaagagtgcgatctggcgggcgcgattaagtcgatgttctctggcgagaagatcaaccgcactgaaaaccgcgccgtgctgcacgtagcgctgcgtaaccgtagcaataccccgattttggttgatggcaaagacgtaatgccggaagtcaacgcggtgctggagaagatgaaaaccttctcagaagcgattatttccggtgagtggaaaggttataccggcaaagcaatcactgacgtagtgaacatcgggatcggcggttctgacctcggcccatacatggtgaccgaagctctgcgtccgtacaaaaaccacctgaacatgcactttgtttctaacgtcgatgggactcacatcgcggaagtgctgaaaaaagtaaacccggaaaccacgctgttcttggtagcatctaaaaccttcaccactcaggaaactatgaccaacgcccatagcgcgcgtgactggttcctgaaagcggcaggtgatgaaaaacacgttgcaaaacactttgcggcgctttccaccaatgccaaagccgttggcgagtttggtattgatactgccaacatgttcgagttctgggactgggttggcggccgttactctttgtggtcagcgattggcctgtcgattgttctctccatcggctttgataacttcgttgaactgctttccggcgcacacgcgatggacaagcatttctccaccacgcctgccgagaaaaacctgcctgtactgctggcgctgattggcatctggtacaacaatttctttggtgcggaaactgaagcgattctgccgtatgaccagtatatgcaccgtttcgcggcgtacttccagcagggcaatatggagtccaacggtaagtatgttgaccgtaacggtaacgttgtggattaccagactggcccgattatctggggtgaaccaggcactaacggtcagcacgcgttctaccagctgatccaccagggaaccaaaatggtaccgtgcgatttcatcgctccggctatcacccataacccgctctctgatcatcaccagaaactgctgtctaacttcttcgcccagaccgaagcgctggcgtttggtaaatcccgcgaagtggttgagcaggaatatcgtgatcagggtaaagatccggcaacgcttgactacgtggtgccgttcaaagtattcgaaggtaaccgcccgaccaactccatcctgctgcgtgaaatcactccgttcagcctgggtgcgttgattgcgctgtatgagcacaaaatctttactcagggcgtgatcctgaacatcttcaccttcgaccagtggggcgtggaactgggtaaacagctggcgaaccgtattctgccagagctgaaagatgataaagaaatcagcagccacgatagctcgaccaatggtctgattaaccgctataaagcgtggcgcggttaa

SEQ ID NO: 192 - DNA, 1476 bp, Escherichia coli
atggcggtaacgcaaacagcccaggcctgtgacctggtcattttcggcgcgaaaggcgaccttgcgcgtcgtaaattgctgccttccctgtatcaactggaaaaagccggtcagctcaacccggacacccggattatcggcgtagggcgtgctgactgggataaagcggcatataccaaagttgtccgcgaggcgctcgaaactttcatgaaagaaaccattgatgaaggtttatgggacaccctgagtgcacgtctggatttttgtaatctcgatgtcaatgacactgctgcattcagccgtctcggcgcgatgctggatcaaaaaaatcgtatcaccattaactactttgccatgccgcccagcacttttggcgcaatttgcaaagggcttggcgaggcaaaactgaatgctaaaccggcacgcgtagtcatggagaaaccgctggggacgtcgctggcgacctcgcaggaaatcaatgatcaggttggcgaatacttcgaggagtgccaggtttaccgtatcgaccactatcttggtaaagaaacggtgctgaacctgttggcgctgcgttttgctaactccctgtttgtgaataactgggacaatcgcaccattgatcatgttgagattaccgtggcagaagaagtggggatcgaagggcgctggggctattttgataaagccggtcagatgcgcgacatgatccagaaccacctgctgcaaattctttgcatgattgcgatgtctccgccgtctgacctgagcgcagacagcatccgcgatgaaaaagtgaaagtactgaagtctctgcgccgcatcgaccgctccaacgtacgcgaaaaaaccgtacgcgggcaatatactgcgggcttcgcccagggcaaaaaagtgccgggatatctggaagaagagggcgcgaacaagagcagcaatacagaaactttcgtggcgatccgcgtcgacattgataactggcgctgggccggtgtgccattctacctgcgtactggtaaacgtctgccgaccaaatgttctgaagtcgtggtctatttcaaaacacctgaactgaatctgtttaaagaatcgtggcaggatctgccgcagaataaactgactatccgtctgcaacctgatgaaggcgtggatatccaggtactgaataaagttcctggccttgaccacaaacataacctgcaaatcaccaagctggatctgagctattcagaaacctttaatcagacgcatctggcggatgcctatgaacgtttgctgctggaaaccatgcgtggtattcaggcactgtttgtacgtcgcgacgaagtggaagaagcctggaaatgggtagactccattactgaggcgtgggcgatggacaatgatgcgccgaaaccgtatcaggccggaacctggggacccgttgcctcggtggcgatgattacccgtgatggtcgttcctggaatgagtttgagtaa

SEQ ID NO: 193 - DNA, 1407 bp, Escherichia coli
atgtccaagcaacagatcggcgtagtcggtatggcagtgatgggacgcaaccttgcgctcaacatcgaaagccgtggttataccgtctctattttcaaccgttcccgtgagaagacggaagaagtgattgccgaaaatccaggcaagaaactggttccttactatacggtgaaagagtttgtcgaatctctggaaacgcctcgtcgcatcctgttaatggtgaaagcaggtgcaggcacggatgctgctattgattccctcaaaccatatctcgataaaggagacatcatcattgatggtggtaacaccttcttccaggacactattcgtcgtaatcgtgagctttcagcagagggctttaacttcatcggtaccggtgtttctggcggtgaagagggggcgctgaaaggtccttctattatgcctggtggccagaaagaagcctatgaattggtagcaccgatcctgaccaaaatcgccgccgtagctgaagacggtgaaccatgcgttacctatattggtgccgatggcgcaggtcactatgtgaagatggttcacaacggtattgaatacggcgatatgcagctgattgctgaagcctattctctgcttaaaggtggcctgaacctcaccaacgaagaactggcgcagacctttaccgagtggaataacggtgaactgagcagttacctgatcgacatcaccaaagatatcttcaccaaaaaagatgaagacggtaactacctggttgatgtgatcctggatgaagcggctaacaaaggtaccggtaaatggaccagccagagcgcgctggatctcggcgaaccgctgtcgctgattaccgagtctgtgtttgcacgttatatctcttctctgaaagatcagcgtgttgccgcatctaaagttctctctggtccgcaagcacagccagcaggcgacaaggctgagttcatcgaaaaagttcgtcgtgcgctgtatctgggcaaaatcgtttcttacgcccagggcttctctcagctgcgtgctgcgtctgaagagtacaactgggatctgaactacggcgaaatcgcgaagattttccgtgctggctgcatcatccgtgcgcagttcctgcagaaaatcaccgatgcttatgccgaaaatccacagatcgctaacctgttgctggctccgtacttcaagcaaattgccgatgactaccagcaggcgctgcgtgatgtcgttgcttatgcagtacagaacggtattccggttccgaccttctccgcagcggttgcctattacgacagctaccgtgctgctgttctgcctgcgaacctgatccaggcacagcgtgactattttggtgcgcatacttataagcgtattgataaagaaggtgtgttccataccgaatggctggattaa

SEQ ID NO: 194 - DNA, 678 bp, Escherichia coli
atgaaacagtatttgattgccccctcaattctgtcggctgattttgcccgcctgggtgaagataccgcaaaagccctggcagctggcgctgatgtcgtgcattttgacgtcatggataaccactatgttcccaatctgacgattgggccaatggtgctgaaatccttgcgtaactatggcattaccgcccctatcgacgtacacctgatggtgaaacccgtcgatcgcattgtgcctgatttcgctgccgctggtgccagcatcattacctttcatccagaagcctccgagcatgttgaccgcacgctgcaactgattaaagaaaatggctgtaaagcgggtctggtatttaacccggcgacacctctgagctatctggattacgtgatggataagctggatgtgatcctgctgatgtccgtcaaccctggtttcggcggtcagtctttcattcctcaaacactggataaactgcgcgaagtacgtcgccgtatcgacgagtctggctttgacattcgactagaagtggacggtggcgtgaaggtgaacaacattggcgaaatcgctgcggcgggcgcggatatgttcgtcgccggttcggcaatcttcgaccagccagactacaaaaaagtcattgatgaaatgcgcagtgaactggcaaaggtaagtcatgaataa

SEQ ID NO: 195 - DNA, 660 bp, Escherichia coli
atgacgcaggatgaattgaaaaaagcagtaggatgggcggcacttcagtatgttcagcccggcaccattgttggtgtaggtacaggttccaccgccgcacactttattgacgcgctcggtacaatgaaaggccagattgaaggggccgtttccagttcagatgcttccactgaaaaactgaaaagcctcggcattcacgtttttgatctcaacgaagtcgacagccttggcatctacgttgatggcgcagatgaaatcaacggccacatgcaaatgatcaaaggcggcggcgcggcgctgacccgtgaaaaaatcattgcttcggttgcagaaaaatttatctgtattgcagacgcttccaagcaggttgatattctgggtaaattcccgctgccagtagaagttatcccgatggcacgtagtgcagtggcgcgtcagctggtgaaactgggcggtcgtccggaataccgtcagggcgtggtgaccgataatggcaacgtgatcctcgacgtccacggcatggaaatccttgacccgatagcgatggaaaacgccataaatgcgattcctggcgtggtgactgttggcttgtttgctaaccgtggcgcggacgttgcgctgattggcacacctgacggtgtcaaaaccattgtgaaatga

SEQ ID NO: 196 - DNA, 450 bp, Escherichia coli
atgaaaaagattgcatttggctgtgatcatgtcggtttcattttaaaacatgaaatagtggcacatttagttgagcgtggcgttgaagtgattgataaaggaacctggtcgtcagagcgtactgattatccacattacgccagtcaagtcgcactggctgttgctggcggagaggttgatggcgggattttgatttgtggtactggcgtcggtatttcgatagcggcgaacaagtttgccggaattcgcgcggtcgtctgtagcgaaccttattccgcgcaactttcgcggcagcataacgacaccaacgtgctggcttttggttcacgagtggttggcctcgaactggcaaaaatgattgtggatgcgtggctgggcgcacagtacgaaggcggtcgtcatcaacaacgcgtggaggcgattacggcaatagagcagcggagaaattga

SEQ ID NO: 197 - DNA, 1992 bp, Escherichia coli
atgtcctcacgtaaagagcttgccaatgctattcgtgcgctgagcatggacgcagtacagaaagccaaatccggtcacccgggtgcccctatgggtatggctgacattgccgaagtcctgtggcgtgatttcctgaaacacaacccgcagaatccgtcctgggctgaccgtgaccgcttcgtgctgtccaacggccacggctccatgctgatctacagcctgctgcacctcaccggttacgatctgccgatggaagaactgaaaaacttccgtcagctgcactctaaaactccgggtcacccggaagtgggttacaccgctggtgtggaaaccaccaccggtccgctgggtcagggtattgccaacgcagtcggtatggcgattgcagaaaaaacgctggcggcgcagtttaaccgtccgggccacgacattgtcgaccactacacctacgccttcatgggcgacggctgcatgatggaaggcatctcccacgaagtttgctctctggcgggtacgctgaagctgggtaaactgattgcattctacgatgacaacggtatttctatcgatggtcacgttgaaggctggttcaccgacgacaccgcaatgcgtttcgaagcttacggctggcacgttattcgcgacatcgacggtcatgacgcggcatctatcaaacgcgcagtagaagaagcgcgcgcagtgactgacaaaccttccctgctgatgtgcaaaaccatcatcggtttcggttccccgaacaaagccggtacccacgactcccacggtgcgccgctgggcgacgctgaaattgccctgacccgcgaacaactgggctggaaatatgcgccgttcgaaatcccgtctgaaatctatgctcagtgggatgcgaaagaagcaggccaggcgaaagaatccgcatggaacgagaaattcgctgcttacgcgaaagcttatccgcaggaagccgctgaatttacccgccgtatgaaaggcgaaatgccgtctgacttcgacgctaaagcgaaagagttcatcgctaaactgcaggctaatccggcgaaaatcgccagccgtaaagcgtctcagaatgctatcgaagcgttcggtccgctgttgccggaattcctcggcggttctgctgacctggcgccgtctaacctgaccctgtggtctggttctaaagcaatcaacgaagatgctgcgggtaactacatccactacggtgttcgcgagttcggtatgaccgcgattgctaacggtatctccctgcacggtggcttcctgccgtacacctccaccttcctgatgttcgtggaatacgcacgtaacgccgtacgtatggctgcgctgatgaaacagcgtcaggtgatggtttacacccacgactccatcggtctgggcgaagacggcccgactcaccagccggttgagcaggtcgcttctctgcgcgtaaccccgaacatgtctacatggcgtccgtgtgaccaggttgaatccgcggtcgcgtggaaatacggtgttgagcgtcaggacggcccgaccgcactgatcctctcccgtcagaacctggcgcagcaggaacgaactgaagagcaactggcaaacatcgcgcgcggtggttatgtgctgaaagactgcgccggtcagccggaactgattttcatcgctaccggttcagaagttgaactggctgttgctgcctacgaaaaactgactgccgaaggcgtgaaagcgcgcgtggtgtccatgccgtctaccgacgcatttgacaagcaggatgctgcttaccgtgaatccgtactgccgaaagcggttactgcacgcgttgctgtagaagcgggtattgctgactactggtacaagtatgttggcctgaacggtgctatcgtcggtatgaccaccttcggtgaatctgctccggcagagctgctgtttgaagagttcggcttcactgttgataacgttgttgcgaaagcaaaagaactgctgtaa

SEQ ID NO: 198 - DNA, 2004 bp, Escherichia coli
atgtcccgaaaagaccttgccaatgcgattcgcgcactcagtatggatgcggtacaaaaagccaactctggtcatcccggcgcgccgatgggcatggctgatattgccgaagtgctgtggaacgattttcttaaacataaccctaccgacccaacctggtatgatcgcgaccgctttattctttccaacggtcacgcgtcgatgctgctctacagtttgctacatctgaccggttacgacctgccgctggaagaactgaagaacttccgtcagttgcattcgaaaaccccaggccacccggagattggctatacgccaggcgttgaaaccaccaccggcccgcttggacaaggtttggcgaacgccgtcgggctggcgatagcagagcgtacactggcggcgcagtttaaccagccagaccatgagatcgtcgatcacttcacctatgtgtttatgggcgacggctgcctgatggaaggtatttcccacgaagtctgttcgctggcaggcacgctgggactgggcaagctgattggtttttacgatcacaacggtatttccatcgacggtgaaacagaaggctggtttaccgacgatacggcaaaacgttttgaagcctatcactggcatgtgatccatgaaatcgacggtcacgatccgcaggcggtgaaggaagcgatccttgaagcgcaaagcgtgaaagataagccgtcgctgattatctgccgtacggtgattggctttggttcgccgaataaagcaggtaaggaagaggcgcacggcgcaccactgggggaagaagaagtggcgctggcacggcaaaaactgggctggcaccatccgccatttgagatccctaaagagatttatcacgcctgggatgcccgtgaaaaaggcgaaaaagcgcagcagagctggaatgagaagtttgccgcctataaaaaggctcatccgcaactggcagaagagtttacccgacggatgagcggtggtttaccgaaggactgggagaaaacgactcagaaatatatcaatgagttacaggcaaatccggcgaaaatcgctacccgtaaggcttcgcaaaatacgcttaacgcttacgggccgatgctgcctgagttgctcggcggttcggcggatctggctcccagcaacctgaccatctggaaaggttctgtttcgctgaaggaagatccagcgggcaactacattcactacggggtgcgtgaatttggcatgaccgctatcgccaacggcatcgcgcaccacggcggctttgtgccgtataccgcgacgttcctgatgtttgttgaatacgcccgtaacgccgcgcggatggcggcactgatgaaagcgcggcagattatggtttatacccacgactcaattggcctgggcgaagatggtccgacgcaccaggctgttgagcaactggccagcctgcgcttaacgccaaatttcagcacctggcgaccgtgcgatcaggtggaagcggcggtgggctggaagctggcggttgagcgccacaacggaccgacggcactgatcctctcaaggcagaatctggcccaggtggaacgtacgccggatcaggttaaagagattgctcgtggcggttatgtgctgaaagacagcggcggtaagccagatattattctgattgccaccggttcagagatggaaattaccctgcaagcggcagagaaattagcaggagaaggtcgcaatgtacgcgtagtttccctgccctcgaccgatattttcgacgcccaggatgaggaatatcgggagtcggtgttgccttctaacgttgcggctcgcgtggcggtggaagcaggtattgccgattactggtacaagtatgttggtctgaaaggggcaattgtcgggatgacgggttacggggaatctgctccggcggataagctgttcccgttctttggctttaccgccgagaatattgtggcaaaagcgcataaggtgctgggagtgaaaggtgcctga

SEQ ID NO: 199 - DNA, 951 bp, Escherichia coli
atgaacgagttagacggcatcaaacagttcaccactgtcgtggcagacagcggcgatattgagtccattcgccattatcatccccaggatgccaccaccaatccttcgctgttactcaaagctgccggattatcacaatatgagcatttaatagacgatgctatcgcctggggtaaaaaaaatggcaagacccaggaacaacaggtggtcgcagcgtgtgacaaactggcggtcaatttcggtgctgaaatcctcaaaatcgtacccggtcgcgtgtcaacagaagttgatgcacgcctctcttttgataaagaaaagagtattgagaaggcgcgccatctggtggacttgtatcagcaacaaggcgttgagaaatcacgcattctgatcaagctggcttcgacctgggaaggaattcgcgcggcagaagagctggaaaaagaaggtattaactgcaacctgacgctgctgttttcttttgcacaggcacgggcctgtgcggaagcaggcgtttttctgatttcgccgtttgtcgggcgtatttatgactggtatcaggcacgcaagccgatggacccgtatgtggtggaagaagatccgggcgttaaatcggtgcgcaatatctacgactactataagcaacaccactatgaaaccattgtgatgggcgcgagcttccgtcgcaccgaacaaatcctcgccttaaccggctgcgatcgactgactatcgcaccgaatttactgaaggagctgcaggaaaaagtttcgccagtggtacgtaaattaatcccaccttctcagacgttcccacgcccagctcccatgagcgaagcggagttccgttgggagcacaatcaggatgcgatggcggtagaaaaactgtctgaaggcattcgtctgttcgccgttgatcaacgcaaactggaagatcttcttgccgccaaactataa

SEQ ID NO: 200 - DNA, 954 bp, Escherichia coli
atgacggacaaattgacctcccttcgtcagtacaccaccgtagtggccgacactggggacatcgcggcaatgaagctgtatcaaccgcaggatgccacaaccaacccttctctcattcttaacgcagcgcagattccggaataccgtaagttgattgatgatgctgtcgcctgggcgaaacagcagagcaacgatcgcgcgcagcagatcgtggacgcgaccgacaaactggcagtaaatattggtctggaaatcctgaaactggttccgggccgtatctcaactgaagttgatgcgcgtctttcctatgacaccgaagcgtcaattgcgaaagcaaaacgcctgatcaaactctacaacgatgctggtattagcaacgatcgtattctgatcaaactggcttctacctggcagggtatccgtgctgcagaacagctggaaaaagaaggcatcaactgtaacctgaccctgctgttctccttcgctcaggctcgtgcttgtgcggaagcgggcgtgttcctgatctcgccgtttgttggccgtattcttgactggtacaaagcgaataccgataagaaagagtacgctccggcagaagatccgggcgtggtttctgtatctgaaatctaccagtactacaaagagcacggttatgaaaccgtggttatgggcgcaagcttccgtaacatcggcgaaattctggaactggcaggctgcgaccgtctgaccatcgcaccggcactgctgaaagagctggcggagagcgaaggggctatcgaacgtaaactgtcttacaccggcgaagtgaaagcgcgtccggcgcgtatcactgagtccgagttcctgtggcagcacaaccaggatccaatggcagtagataaactggcggaaggtatccgtaagtttgctattgaccaggaaaaactggaaaaaatgatcggcgatctgctgtaa

SEQ ID NO: 201 - DNA, 963 bp, Escherichia coli
atgattaagaaaatcggtgtgttgacaagcggcggtgatgcgccaggcatgaacgccgcaattcgcggggttgttcgttctgcgctgacagaaggtctggaagtaatgggtatttatgacggctatctgggtctgtatgaagaccgtatggtacagctagaccgttacagcgtgtctgacatgatcaaccgtggcggtacgttcctcggttctgcgcgtttcccggaattccgcgacgagaacatccgcgccgtggctatcgaaaacctgaaaaaacgtggtatcgacgcgctggtggttatcggcggtgacggttcctacatgggtgcaatgcgtctgaccgaaatgggcttcccgtgcatcggtctgccgggcactatcgacaacgacatcaaaggcactgactacactatcggtttcttcactgcgctgagcaccgttgtagaagcgatcgaccgtctgcgtgacacctcttcttctcaccagcgtatttccgtggtggaagtgatgggccgttattgtggagatctgacgttggctgcggccattgccggtggctgtgaattcgttgtggttccggaagttgaattcagccgtgaagacctggtaaacgaaatcaaagcgggtatcgcgaaaggtaaaaaacacgcgatcgtggcgattaccgaacatatgtgtgatgttgacgaactggcgcatttcatcgagaaagaaaccggtcgtgaaacccgcgcaactgtgctgggccacatccagcgcggtggttctccggtgccttacgaccgtattctggcttcccgtatgggcgcttacgctatcgatctgctgctggcaggttacggcggtcgttgtgtaggtatccagaacgaacagctggttcaccacgacatcatcgacgctatcgaaaacatgaagcgtccgttcaaaggtgactggctggactgcgcgaaaaaactgtattaa

SEQ ID NO: 202 - DNA, 930 bp, Escherichia coli
atggtacgtatctatacgttgacacttgcgccctctctcgatagcgcaacaattaccccgcaaatttatcccgaaggaaaactgcgctgtaccgcaccggtgttcgaacccgggggcggcggcatcaacgtcgcccgcgccattgcccatcttggaggcagtgccacagcgatcttcccggcgggtggcgcgaccggcgaacacctggtttcactgttggcggatgaaaatgtccccgtcgctactgtagaagccaaagactggacccggcagaatttacacgtacatgtggaagcaagcggtgagcagtatcgttttgttatgccaggcgcggcattaaatgaagatgagtttcgccagcttgaagagcaagttctggaaattgaatccggggccatcctggtcataagcggaagcctgccgccaggtgtgaagctggaaaaattaacccaactgatttccgctgcgcaaaaacaagggatccgctgcatcgtcgacagttctggcgaagcgttaagtgcagcactggcaattggtaacatcgagttggttaagcctaaccaaaaagaactcagtgcgctggtgaatcgcgaactcacccagccggacgatgtccgcaaagccgcgcaggaaatcgttaatagcggcaaggccaaacgggttgtcgtttccctgggtccacaaggagcgctgggtgttgatagtgaaaactgtattcaggtggtgccaccaccggtgaaaagccagagtaccgttggcgctggtgacagcatggtcggcgcgatgacactgaaactggcagaaaatgcctctcttgaagagatggttcgttttggcgtagctgcggggagtgcagccacactcaatcagggaacacgtctgtgctcccatgacgatacgcaaaaaatttacgcttacctttcccgctaa

SEQ ID NO: 203 - DNA, 1080 bp, Escherichia coli
atgtctaagatttttgatttcgtaaaacctggcgtaatcactggtgatgacgtacagaaagttttccaggtagcaaaagaaaacaacttcgcactgccagcagtaaactgcgtcggtactgactccatcaacgccgtactggaaaccgctgctaaagttaaagcgccggttatcgttcagttctccaacggtggtgcttcctttatcgctggtaaaggcgtgaaatctgacgttccgcagggtgctgctatcctgggcgcgatctctggtgcgcatcacgttcaccagatggctgaacattatggtgttccggttatcctgcacactgaccactgcgcgaagaaactgctgccgtggatcgacggtctgttggacgcgggtgaaaaacacttcgcagctaccggtaagccgctgttctcttctcacatgatcgacctgtctgaagaatctctgcaagagaacatcgaaatctgctctaaatacctggagcgcatgtccaaaatcggcatgactctggaaatcgaactgggttgcaccggtggtgaagaagacggcgtggacaacagccacatggacgcttctgcactgtacacccagccggaagacgttgattacgcatacaccgaactgagcaaaatcagcccgcgtttcaccatcgcagcgtccttcggtaacgtacacggtgtttacaagccgggtaacgtggttctgactccgaccatcctgcgtgattctcaggaatatgtttccaagaaacacaacctgccgcacaacagcctgaacttcgtattccacggtggttccggttctactgctcaggaaatcaaagactccgtaagctacggcgtagtaaaaatgaacatcgataccgatacccaatgggcaacctgggaaggcgttctgaactactacaaagcgaacgaagcttatctgcagggtcagctgggtaacccgaaaggcgaagatcagccgaacaagaaatactacgatccgcgcgtatggctgcgtgccggtcagacttcgatgatcgctcgtctggagaaagcattccaggaactgaacgcgatcgacgttctgtaa

SEQ ID NO: 204 - DNA, 1053 bp, Escherichia coli
atgacagatattgcgcagttgcttggcaaagacgccgacaaccttttacagcaccgttgtatgacaattccttctgaccagctttatctccccggacatgactacgtagaccgcgtaatgattgacaataatcgcccgccagcggtgttacgtaatatgcagacgttgtacaacaccgggcgtctggctggcacaggatatctttctattctgccggttgaccagggcgttgagcactctgccggagcttcatttgctgctaacccgctctactttgacccgaaaaacattgttgaactggcgatcgaagcgggctgtaactgtgtggcgtcaacttacggcgtgctggcgtcggtatcgcggcgttatgcgcatcgcattccattcctcgtcaaacttaatcacaacgagacgctaagttacccgaatacctacgatcaaacgctgtatgccagcgtggagcaggcgttcaacatgggcgcggttgcggttggtgcgactatctattttggctcggaagagtcacgtcgccagattgaagaaatttctgcggcttttgaacgtgcgcacgagctgggtatggtgacagtgctgtgggcctatttgcgtaactccgcctttaagaaagatggcgttgattaccatgtttccgccgacctgaccggtcaggcaaaccatctggcggcaaccatcggtgcagatatcgtcaaacaaaaaatggcggaaaataacggcggctataaagcaattaattacggttacaccgacgatcgtgtttacagcaaattgaccagcgaaaacccgattgatctggtgcgttatcagttagctaactgctatatgggtcgggctgggttgataaactccggcggtgctgcgggcggtgaaactgacctcagcgatgcagtgcgtactgcggttatcaacaaacgcgcaggcggaatggggctgattcttggacgtaaagcgttcaagaaatcgatggctgacggcgtgaaactgattaacgccgtgcaggacgtttatctcgatagcaaaattactatcgcctga

SEQ ID NO: 205 - DNA, 768 bp, Escherichia coli
atgcgacatcctttagtgatgggtaactggaaactgaacggcagccgccacatggttcacgagctggtttctaacctgcgtaaagagctggcaggtgttgctggctgtgcggttgcaatcgcaccaccggaaatgtatatcgatatggcgaagcgcgaagctgaaggcagccacatcatgctgggtgcgcaaaacgtggacctgaacctgtccggcgcattcaccggtgaaacctctgctgctatgctgaaagacatcggcgcacagtacatcatcatcggtcactctgaacgtcgtacttaccacaaagaatctgacgaactgatcgcgaaaaaattcgcggtgctgaaagagcagggcctgactccggttctgtgcatcggtgaaaccgaagctgaaaatgaagcgggcaaaactgaagaagtttgcgcacgtcagatcgacgcggtactgaaaactcagggtgctgcggcattcgaaggtgcggttatcgcttacgaacctgtatgggcaatcggtactggcaaatctgcaactccggctcaggcacaggctgttcacaaattcatccgtgaccacatcgctaaagttgacgctaacatcgctgaacaagtgatcattcagtacggcggctctgtaaacgcgtctaacgctgcagaactgtttgctcagccggatatcgacggcgcgctggttggtggtgcttctctgaaagctgacgccttcgcagtaatcgttaaagctgcagaagcggctaaacaggcttaa

SEQ ID NO: 206 - DNA, 996 bp, Escherichia coli
atgactatcaaagtaggtatcaacggttttggccgtatcggtcgcattgttttccgtgctgctcagaaacgttctgacatcgagatcgttgcaatcaacgacctgttagacgctgattacatggcatacatgctgaaatatgactccactcacggccgtttcgacggtaccgttgaagtgaaagacggtcatctgatcgttaacggtaaaaaaatccgtgttaccgctgaacgtgatccggctaacctgaaatgggacgaagttggtgttgacgttgtcgctgaagcaactggtctgttcctgactgacgaaactgctcgtaaacacatcaccgctggtgcgaagaaagtggttatgactggtccgtctaaagacaacactccgatgttcgttaaaggcgctaacttcgacaaatatgctggccaggacatcgtttccaacgcttcctgcaccaccaactgcctggctccgctggctaaagttatcaacgataacttcggcatcatcgaaggtctgatgaccaccgttcacgctactaccgctactcagaaaaccgttgatggcccgtctcacaaagactggcgcggcggccgcggcgcttcccagaacatcatcccgtcctctaccggtgctgctaaagctgtaggtaaagtactgccagaactgaatggcaaactgactggtatggcgttccgcgttccgaccccgaacgtatctgtagttgacctgaccgttcgtctggaaaaagctgcaacttacgagcagatcaaagctgccgttaaagctgctgctgaaggcgaaatgaaaggcgttctgggctacaccgaagatgacgtagtatctaccgatttcaacggcgaagtttgcacttccgtgttcgatgctaaagctggtatcgctctgaacgacaacttcgtgaaactggtatcctggtacgacaacgaaaccggttactccaacaaagttctggacctgatcgctcacatctccaaataa

SEQ ID NO: 207 - DNA, 1164 bp, Escherichia coli
atgtctgtaattaagatgaccgatctggatcttgctgggaaacgtgtatttatccgtgcggatctgaacgtaccagtaaaagacgggaaagtaaccagcgacgcgcgtatccgtgcttctctgccgaccatcgaactggccctgaaacaaggcgcaaaagtgatggtaacttcccacctgggtcgtcctaccgaaggcgagtacaacgaagaattctctctgctgccggttgttaactacctgaaagacaaactgtctaacccggttcgtctggttaaagattacctcgacggcgttgacgttgctgaaggtgaactggttgttctggaaaacgttcgcttcaacaaaggcgagaagaaagacgacgaaaccctgtccaaaaaatacgctgcactgtgtgacgtgttcgtaatggacgcattcggtactgctcaccgcgcgcaggcttctactcacggtatcggtaaattcgctgacgttgcgtgcgcaggcccgctgctggcagctgaactggacgcgctgggtaaagcactgaaagaacctgctcgcccgatggtggctatcgttggtggttctaaagtatctaccaaactgaccgttctggactccctgtctaaaatcgctgaccagctgattgttggtggtggtatcgctaacacctttatcgcggcacaaggccacgatgtgggtaaatccctgtacgaagctgacctggttgacgaagctaaacgtctgctgaccacctgcaacatcccggttccgtctgatgttcgcgtagcaaccgagttctctgaaactgcaccggctaccctgaaatctgttaacgatgtgaaagctgacgagcagatcctggatatcggtgatgcttccgctcaggaactggctgaaatcctgaagaatgcgaaaaccattctgtggaacggtccggttggcgtgttcgaattcccgaacttccgcaaaggtactgaaatcgtggctaacgctatcgcagacagcgaagcgttctccatcgctggcggcggcgacactctggcagcaatcgacctgttcggcattgctgacaaaatctcctacatctccactggcggcggcgcattcctcgaattcgtggaaggtaaagtactgcctgcagtagcgatgctcgaagagcgcgctaagaagtaa

SEQ ID NO: 208 - DNA, 648 bp, Escherichia coli
atgttacaggtatacctagtccgccacggtgaaacgcagtggaacgccgagcgacgtattcagggccagtctgacagcccgctgaccgccaaaggtgagcaacaggcgatgcaggtggcaacccgtgccaaagagcttggcattacgcatatcatcagtagcgatttaggacgcacccggcgtacggcggaaatcatcgcccaggcctgcggctgtgacatcatctttgattctcgcctgcgtgaattaaacatgggtgtgctggaaaaaagacatatcgattctctgaccgaagaagaagagaactggcgtcggcagctggtcaatggcaccgttgacgggcgtattcctgaaggcgagtcaatgcaggagctcagcgatcgcgtcaatgcggcactggaatcttgccgggacttaccgcagggaagccgaccgctgctggtgagtcatggtattgcactgggatgcctggtgagtacgattctcggattaccagcatgggcagagcgccgcttacgtctgcgtaactgttctatttcgcgcgtggattatcaggaaagcctgtggctggcgtctggctgggtcgttgaaaccgcaggggacatctcgcatctggacgcccctgcattagatgagctgcagcgttaa

SEQ ID NO: 209 - DNA, 753 bp, Escherichia coli
atggctgtaactaagctggttctggttcgtcatggcgaaagtcagtggaacaaagaaaaccgtttcaccggttggtacgacgtggatctgtctgagaaaggcgtaagcgaagcaaaagcagcaggtaagctgctgaaagaggaaggttacagctttgactttgcttacacttctgtgctgaaacgcgctatccataccctgtggaatgtgctggacgaactggatcaggcatggctgcccgttgagaaatcctggaaactgaacgaacgtcactacggtgcgttgcagggtctgaacaaagcggaaactgctgaaaagtatggcgacgagcaggtgaaacagtggcgtcgtggttttgcagtgactccgccggaactgactaaagatgatgagcgttatccgggtcacgatccgcgttacgcgaaactgagcgagaaagaactgccgctgacggaaagcctggcgctgaccattgaccgcgtgatcccttactggaatgaaactattctgccgcgtatgaagagcggtgagcgcgtgatcatcgctgcacacggtaactctttacgtgcgctggtgaaatatcttgataacatgagcgaagaagagattcttgagcttaatatcccgactggcgtgccgctggtgtatgagttcgacgagaatttcaaaccgctgaaacgctattatctgggtaatgctgacgagatcgcagcgaaagcagcggcggttgcaaaccagggtaaagcgaagtaa

SEQ ID NO: 210 - DNA, 1545 bp, Escherichia coli
atgttggtttctaaaaaacctatggtactggtgattctggatggctatggctatcgcgaagaacagcaggataacgccatttttagtgctaaaaccccggtaatggatgcactgtgggccaatcgtccgcataccctaatcgacgcttccggtctggaagtcggtctgcctgaccgtcagatgggtaactccgaagtaggccacgttaacctgggtgccggccgcatcgtgtatcaggacctgactcgtctggacgttgaaatcaaagatcgcgctttctttgctaatccggtgctgactggcgcggtagataaagcgaaaaacgcaggcaaagcggtacacattatgggtctgctctccgcaggcggcgtacacagccacgaagatcacatcatggcgatggtagaactggcagctgaacgcggcgcagaaaaaatctacctgcacgcattccttgacggtcgcgacactccgccgcgcagtgctgaatcctcgctgaaaaaattcgaagaaaaatttgccgcgctgggcaaaggccgcgtagcgtccatcattggtcgttactacgcgatggaccgcgataaccgttgggatcgcgtagaaaaagcttatgacctgctgactctggcgcagggcgagttccaggccgataccgccgttgctggtttgcaggctgcttatgctcgcgacgaaaatgatgaattcgtgaaagcgaccgttatccgtgctgaaggtcagccagacgcggcaatggaagacggcgatgcactgattttcatgaacttccgtgctgaccgcgcgcgtgaaatcactcgtgctttcgtgaacgctgatttcgatggcttcgcgcgtaagaaagtggttaacgtcgatttcgtgatgctgaccgaatacgccgctgacatcaaaactgcggttgcttacccacccgcttccctggttaacaccttcggcgagtggatggcgaaaaacgacaaaactcagttgcgtatttccgaaaccgaaaaatatgcccacgttactttcttcttcaacggtggcgtagaagagtcgttcaaaggcgaagatcgcattctgatcaactcaccgaaagtggctacctacgatctgcaaccggaaatgagctccgcagagctgaccgaaaaactggttgcggccatcaagagcggcaaatacgacaccatcatctgtaactatccgaacggcgacatggtaggtcacaccggggtgatggaagcggcggttaaagcggttgaagcgctggatcactgcgtggaagaagtcgcgaaagcggttgagtccgtgggtggacaactgctgatcaccgctgaccacggtaacgctgagcagatgcgcgatccggcaacgggtcaggcacacacggcacacaccaacctgccagttccgctgatttacgttggtgataagaacgtgaaagcggttgaaggcggcaaactttctgacatcgcgccgaccatgttgtcgctgatgggtatggaaatcccgcaagagatgactggtaagccgctgttcatcgtggaataa

SEQ ID NO: 211 - DNA, 1299 bp, Escherichia coli
atgtccaaaatcgtaaaaatcatcggtcgtgaaatcatcgactcccgtggtaacccgactgttgaagccgaagtacatctggagggtggtttcgtcggtatggcagctgctccgtcaggtgcttctactggttcccgtgaagctctggaactgcgcgatggcgacaaatcccgtttcctgggtaaaggcgtaaccaaagctgttgctgcggtaaacggcccgatcgctcaggcgctgattggcaaagatgctaaagatcaggctggcattgacaagatcatgatcgacctggacggcaccgaaaacaaatccaaattcggcgcgaacgcaatcctggctgtatctctggctaacgccaaagctgctgcagctgctaaaggtatgccgctgtacgagcacatcgctgaactgaacggtactccgggcaaatactctatgccggttccgatgatgaacatcatcaacggtggtgagcacgctgacaacaacgttgatatccaggaattcatgattcagccggttggcgcgaaaactgtgaaagaagccatccgcatgggttctgaagttttccatcacctggcaaaagttctgaaagcgaaaggcatgaacactgctgttggtgacgaaggtggctatgcgccgaacctgggttccaacgctgaagctctggctgttatcgctgaagctgttaaagctgctggttatgaactgggcaaagacatcactttggcgatggactgcgcagcttctgaattctacaaagatggtaaatacgttctggctggcgaaggcaacaaagcgttcacctctgaagaattcactcacttcctggaagaactgaccaaacagtacccgatcgtttctatcgaagacggtctggacgaatctgactgggacggtttcgcataccagaccaaagttctgggcgacaaaatccagctggttggtgacgacctgttcgtaaccaacaccaagatcctgaaagaaggtatcgaaaaaggtatcgctaactccatcctgatcaaattcaaccagatcggttctctgaccgaaactctggctgcaatcaagatggcgaaagatgctggctacactgcagttatctctcaccgttctggcgaaactgaagacgctaccatcgctgacctggctgttggtactgctgcaggccagatcaaaactggttctatgagccgttctgaccgtgttgctaaatacaaccagctgattcgtatcgaagaagctctgggcgaaaaagcaccgtacaacggtcgtaaagagatcaaaggccaggcataa

SEQ ID NO: 212 - DNA, 1443 bp, Escherichia coli
atgtccagaaggcttcgcagaacaaaaatcgttaccacgttaggcccagcaacagatcgcgataataatcttgaaaaagttatcgcggcgggtgccaacgttgtacgtatgaacttttctcacggctcgcctgaagatcacaaaatgcgcgcggataaagttcgtgagattgccgcaaaactggggcgtcatgtggctattctgggtgacctccaggggcccaaaatccgtgtatccacctttaaagaaggcaaagttttcctcaatattggggataaattcctgctcgacgccaacctgggtaaaggtgaaggcgacaaagaaaaagtcggtatcgactacaaaggcctgcctgctgacgtcgtgcctggtgacatcctgctgctggacgatggtcgcgtccagttaaaagtactggaagttcagggcatgaaagtgttcaccgaagtcaccgtcggtggtcccctctccaacaataaaggtatcaacaaacttggcggcggtttgtcggctgaagcgctgaccgaaaaagacaaagcagacattaagactgcggcgttgattggcgtagattacctggctgtctccttcccacgctgtggcgaagatctgaactatgcccgtcgcctggcacgcgatgcaggatgtgatgcgaaaattgttgccaaggttgaacgtgcggaagccgtttgcagccaggatgcaatggatgacatcatcctcgcctctgacgtggtaatggttgcacgtggcgacctcggtgtggaaattggcgacccggaactggtcggcattcagaaagcgttgatccgtcgtgcgcgtcagctaaaccgagcggtaatcacggcgacccagatgatggagtcaatgattactaacccgatgccgacgcgtgcagaagtcatggacgtagcaaacgccgttctggatggtactgacgctgtgatgctgtctgcagaaactgccgctgggcagtatccgtcagaaaccgttgcagccatggcgcgcgtttgcctgggtgcggaaaaaatcccgagcatcaacgtttctaaacaccgtctggacgttcagttcgacaatgtggaagaagctattgccatgtcagcaatgtacgcagctaaccacctgaaaggcgttacggcgatcatcaccatgaccgaatcgggtcgtaccgcgctgatgacctcccgtatcagctctggtctgccaattttcgccatgtcgcgccatgaacgtacgctgaacctgactgctctctatcgtggcgttacgccggtgcactttgatagcgctaatgacggcgtagcagctgccagcgaagcggttaatctgctgcgcgataaaggttacttgatgtctggtgacctggtgattgtcacccagggcgacgtgatgagtaccgtgggttctactaataccacgcgtattttaacggtagagtaa

SEQ ID NO: 213 - DNA, 1413 bp, Escherichia coli
atgaaaaagaccaaaattgtttgcaccatcggaccgaaaaccgaatctgaagagatgttagctaaaatgctggacgctggcatgaacgttatgcgtctgaacttctctcatggtgactatgcagaacacggtcagcgcattcagaatctgcgcaacgtgatgagcaaaactggtaaaaccgccgctatcctgcttgataccaaaggtccggaaatccgcaccatgaaactggaaggcggtaacgacgtttctctgaaagctggtcagacctttactttcaccactgataaatctgttatcggcaacagcgaaatggttgcggtaacgtatgaaggtttcactactgacctgtctgttggcaacaccgtactggttgacgatggtctgatcggtatggaagttaccgccattgaaggtaacaaagttatctgtaaagtgctgaacaacggtgacctgggcgaaaacaaaggtgtgaacctgcctggcgtttccattgctctgccagcactggctgaaaaagacaaacaggacctgatctttggttgcgaacaaggcgtagactttgttgctgcttcctttattcgtaagcgttctgacgttatcgaaatccgtgagcacctgaaagcgcacggcggcgaaaacatccacatcatctccaaaatcgaaaaccaggaaggcctcaacaacttcgacgaaatcctcgaagcctctgacggcatcatggttgcgcgtggcgacctgggtgtagaaatcccggtagaagaagttatcttcgcccagaagatgatgatcgaaaaatgtatccgtgcacgtaaagtcgttatcactgcgacccagatgctggattccatgatcaaaaacccacgcccgactcgcgcagaagccggtgacgttgcaaacgccatcctcgacggtactgacgcagtgatgctgtctggtgaatccgcaaaaggtaaatacccgctggaagcggtttctatcatggcgaccatctgcgaacgtaccgaccgcgtgatgaacagccgtctcgagttcaacaatgacaaccgtaaactgcgcattaccgaagcggtatgccgtggtgccgttgaaactgctgaaaaactggatgctccgctgatcgtggttgctactcagggcggtaaatctgctcgcgcagtacgtaaatacttcccggatgccaccatcctggcactgaccaccaacgaaaaaacggctcatcagttggtactgagcaaaggcgttgtgccgcagcttgttaaagagatcacttctactgatgatttctaccgtctgggtaaagaactggctctgcagagcggtctggcacacaaaggtgacgttgtagttatggtttctggtgcactggtaccgagcggcactactaacaccgcatctgttcacgtcctgtaa

SEQ ID NO: 214 - DNA, 1425 bp, Escherichia coli
atgagtactgaaatcaaaactcaggtcgtggtacttggggcaggccccgcaggttactccgctgccttccgttgcgctgatttaggtctggaaaccgtaatcgtagaacgttacaacacccttggcggtgtttgcctgaacgtcggctgtatcccttctaaagcactgctgcacgtagcaaaagttatcgaagaagccaaagcgctggctgaacacggtatcgtcttcggcgaaccgaaaaccgatatcgacaagattcgtacctggaaagagaaagtgatcaatcagctgaccggtggtctggctggtatggcgaaaggccgcaaagtcaaagtggtcaacggtctgggtaaattcaccggggctaacaccctggaagttgaaggtgagaacggcaaaaccgtgatcaacttcgacaacgcgatcattgcagcgggttctcgcccgatccaactgccgtttattccgcatgaagatccgcgtatctgggactccactgacgcgctggaactgaaagaagtaccagaacgcctgctggtaatgggtggcggtatcatcggtctggaaatgggcaccgtttaccacgcgctgggttcacagattgacgtggttgaaatgttcgaccaggttatcccggcagctgacaaagacatcgttaaagtcttcaccaagcgtatcagcaagaaattcaacctgatgctggaaaccaaagttaccgccgttgaagcgaaagaagacggcatttatgtgacgatggaaggcaaaaaagcacccgctgaaccgcagcgttacgacgccgtgctggtagcgattggtcgtgtgccgaacggtaaaaacctcgacgcaggcaaagcaggcgtggaagttgacgaccgtggtttcatccgcgttgacaaacagctgcgtaccaacgtaccgcacatctttgctatcggcgatatcgtcggtcaaccgatgctggcacacaaaggtgttcacgaaggtcacgttgccgctgaagttatcgccggtaagaaacactacttcgatccgaaagttatcccgtccatcgcctataccgaaccagaagttgcatgggtgggtctgactgagaaagaagcgaaagagaaaggcatcagctatgaaaccgccaccttcccgtgggctgcttctggtcgtgctatcgcttccgactgcgcagacggtatgaccaagctgattttcgacaaagaatctcaccgtgtgatcggtggtgcgattgtcggtactaacggcggcgagctgctgggtgaaatcggcctggcaatcgaaatgggttgtgatgctgaagacatcgcactgaccatccacgcgcacccgactctgcacgagtctgtgggcctggcggcagaagtgttcgaaggtagcattaccgacctgccgaacccgaaagcgaagaagaagtaa

SEQ ID NO: 215 - DNA, 2664 bp, Escherichia coli
atgtcagaacgtttcccaaatgacgtggatccgatcgaaactcgcgactggctccaggcgatcgaatcggtcatccgtgaagaaggtgttgagcgtgctcagtatctgatcgaccaactgcttgctgaagcccgcaaaggcggtgtaaacgtagccgcaggcacaggtatcagcaactacatcaacaccatccccgttgaagaacaaccggagtatccgggtaatctggaactggaacgccgtattcgttcagctatccgctggaacgccatcatgacggtgctgcgtgcgtcgaaaaaagacctcgaactgggcggccatatggcgtccttccagtcttccgcaaccatttatgatgtgtgctttaaccacttcttccgtgcacgcaacgagcaggatggcggcgacctggtttacttccagggccacatctccccgggcgtgtacgctcgtgctttcctggaaggtcgtctgactcaggagcagctggataacttccgtcaggaagttcacggcaatggcctctcttcctatccgcacccgaaactgatgccggaattctggcagttcccgaccgtatctatgggtctgggtccgattggtgctatttaccaggctaaattcctgaaatatctggaacaccgtggcctgaaagatacctctaaacaaaccgtttacgcgttcctcggtgacggtgaaatggacgaaccggaatccaaaggtgcgatcaccatcgctacccgtgaaaaactggataacctggtcttcgttatcaactgtaacctgcagcgtcttgacggcccggtcaccggtaacggcaagatcatcaacgaactggaaggcatcttcgaaggtgctggctggaacgtgatcaaagtgatgtggggtagccgttgggatgaactgctgcgtaaggataccagcggtaaactgatccagctgatgaacgaaaccgttgacggcgactaccagaccttcaaatcgaaagatggtgcgtacgttcgtgaacacttcttcggtaaatatcctgaaaccgcagcactggttgcagactggactgacgagcagatctgggcactgaaccgtggtggtcacgatccgaagaaaatctacgctgcattcaagaaagcgcaggaaaccaaaggcaaagcgacagtaatccttgctcataccattaaaggttacggcatgggcgacgcggctgaaggtaaaaacatcgcgcaccaggttaagaaaatgaacatggacggtgtgcgtcatatccgcgaccgtttcaatgtgccggtgtctgatgcagatatcgaaaaactgccgtacatcaccttcccggaaggttctgaagagcatacctatctgcacgctcagcgtcagaaactgcacggttatctgccaagccgtcagccgaacttcaccgagaagcttgagctgccgagcctgcaagacttcggcgcgctgttggaagagcagagcaaagagatctctaccactatcgctttcgttcgtgctctgaacgtgatgctgaagaacaagtcgatcaaagatcgtctggtaccgatcatcgccgacgaagcgcgtactttcggtatggaaggtctgttccgtcagattggtatttacagcccgaacggtcagcagtacaccccgcaggaccgcgagcaggttgcttactataaagaagacgagaaaggtcagattctgcaggaagggatcaacgagctgggcgcaggttgttcctggctggcagcggcgacctcttacagcaccaacaatctgccgatgatcccgttctacatctattactcgatgttcggcttccagcgtattggcgatctgtgctgggcggctggcgaccagcaagcgcgtggcttcctgatcggcggtacttccggtcgtaccaccctgaacggcgaaggtctgcagcacgaagatggtcacagccacattcagtcgctgactatcccgaactgtatctcttacgacccggcttacgcttacgaagttgctgtcatcatgcatgacggtctggagcgtatgtacggtgaaaaacaagagaacgtttactactacatcactacgctgaacgaaaactaccacatgccggcaatgccggaaggtgctgaggaaggtatccgtaaaggtatctacaaactcgaaactattgaaggtagcaaaggtaaagttcagctgctcggctccggttctatcctgcgtcacgtccgtgaagcagctgagatcctggcgaaagattacggcgtaggttctgacgtttatagcgtgacctccttcaccgagctggcgcgtgatggtcaggattgtgaacgctggaacatgctgcacccgctggaaactccgcgcgttccgtatatcgctcaggtgatgaacgacgctccggcagtggcatctaccgactatatgaaactgttcgctgagcaggtccgtacttacgtaccggctgacgactaccgcgtactgggtactgatggcttcggtcgttccgacagccgtgagaacctgcgtcaccacttcgaagttgatgcttcttatgtcgtggttgcggcgctgggcgaactggctaaacgtggcgaaatcgataagaaagtggttgctgacgcaatcgccaaattcaacatcgatgcagataaagttaacccgcgtctggcgtaa

SEQ ID NO: 216 - DNA, 1893 bp, Escherichia coli
atggctatcgaaatcaaagtaccggacatcggggctgatgaagttgaaatcaccgagatcctggtcaaagtgggcgacaaagttgaagccgaacagtcgctgatcaccgtagaaggcgacaaagcctctatggaagttccgtctccgcaggcgggtatcgttaaagagatcaaagtctctgttggcgataaaacccagaccggcgcactgattatgattttcgattccgccgacggtgcagcagacgctgcacctgctcaggcagaagagaagaaagaagcagctccggcagcagcaccagcggctgcggcggcaaaagacgttaacgttccggatatcggcagcgacgaagttgaagtgaccgaaatcctggtgaaagttggcgataaagttgaagctgaacagtcgctgatcaccgtagaaggcgacaaggcttctatggaagttccggctccgtttgctggcaccgtgaaagagatcaaagtgaacgtgggtgacaaagtgtctaccggctcgctgattatggtcttcgaagtcgcgggtgaagcaggcgcggcagctccggccgctaaacaggaagcagctccggcagcggcccctgcaccagcggctggcgtgaaagaagttaacgttccggatatcggcggtgacgaagttgaagtgactgaagtgatggtgaaagtgggcgacaaagttgccgctgaacagtcactgatcaccgtagaaggcgacaaagcttctatggaagttccggcgccgtttgcaggcgtcgtgaaggaactgaaagtcaacgttggcgataaagtgaaaactggctcgctgattatgatcttcgaagttgaaggcgcagcgcctgcggcagctcctgcgaaacaggaagcggcagcgccggcaccggcagcaaaagctgaagccccggcagcagcaccagctgcgaaagcggaaggcaaatctgaatttgctgaaaacgacgcttatgttcacgcgactccgctgatccgccgtctggcacgcgagtttggtgttaaccttgcgaaagtgaagggcactggccgtaaaggtcgtatcctgcgcgaagacgttcaggcttacgtgaaagaagctatcaaacgtgcagaagcagctccggcagcgactggcggtggtatccctggcatgctgccgtggccgaaggtggacttcagcaagtttggtgaaatcgaagaagtggaactgggccgcatccagaaaatctctggtgcgaacctgagccgtaactgggtaatgatcccgcatgttactcacttcgacaaaaccgatatcaccgagttggaagcgttccgtaaacagcagaacgaagaagcggcgaaacgtaagctggatgtgaagatcaccccggttgtcttcatcatgaaagccgttgctgcagctcttgagcagatgcctcgcttcaatagttcgctgtcggaagacggtcagcgtctgaccctgaagaaatacatcaacatcggtgtggcggtggataccccgaacggtctggttgttccggtattcaaagacgtcaacaagaaaggcatcatcgagctgtctcgcgagctgatgactatttctaagaaagcgcgtgacggtaagctgactgcgggcgaaatgcagggcggttgcttcaccatctccagcatcggcggcctgggtactacccacttcgcgccgattgtgaacgcgccggaagtggctatcctcggcgtttccaagtccgcgatggagccggtgtggaatggtaaagagttcgtgccgcgtctgatgctgccgatttctctctccttcgaccaccgcgtgatcgacggtgctgatggtgcccgtttcattaccatcattaacaacacgctgtctgacattcgccgtctggtgatgtaa

SEQ ID NO: 217 - DNA, 1284 bp, Escherichia coli
atggctgatacaaaagcaaaactcaccctcaacggggatacagctgttgaactggatgtgctgaaaggcacgctgggtcaagatgttattgatatccgtactctcggttcaaaaggtgtgttcacctttgacccaggcttcacttcaaccgcatcctgcgaatctaaaattacttttattgatggtgatgaaggtattttgctgcaccgcggtttcccgatcgatcagctggcgaccgattctaactacctggaagtttgttacatcctgctgaatggtgaaaaaccgactcaggaacagtatgacgaatttaaaactacggtgacccgtcataccatgatccacgagcagattacccgtctgttccatgctttccgtcgcgactcgcatccaatggcagtcatgtgtggtattaccggcgcgctggcggcgttctatcacgactcgctggatgttaacaatcctcgtcaccgtgaaattgccgcgttccgcctgctgtcgaaaatgccgaccatggccgcgatgtgttacaagtattccattggtcagccatttgtttacccgcgcaacgatctctcctacgccggtaacttcctgaatatgatgttctccacgccgtgcgaaccgtatgaagttaatccgattctggaacgtgctatggaccgtattctgatcctgcacgctgaccatgaacagaacgcctctacctccaccgtgcgtaccgctggctcttcgggtgcgaacccgtttgcctgtatcgcagcaggtattgcttcactgtggggacctgcgcacggcggtgctaacgaagcggcgctgaaaatgctggaagaaatcagctccgttaaacacattccggaatttgttcgtcgtgcgaaagacaaaaatgattctttccgcctgatgggcttcggtcaccgcgtgtacaaaaattacgacccgcgcgccaccgtaatgcgtgaaacctgccatgaagtgctgaaagagctgggcacgaaggatgacctgctggaagtggctatggagctggaaaacatcgcgctgaacgacccgtactttatcgagaagaaactgtacccgaacgtcgatttctactctggtatcatcctgaaagcgatgggtattccgtcttccatgttcaccgtcattttcgcaatggcacgtaccgttggctggatcgcccactggagcgaaatgcacagtgacggtatgaagattgcccgtccgcgtcagctgtatacaggatatgaaaaacgcgactttaaaagcgatatcaagcgttaa

SEQ ID NO: 218 - DNA, 1170 bp, Escherichia coli
atgagcgacacaacgatcctgcaaaacagtacccatgtcattaaaccgaaaaaatctgtggcactttctggcgttccggcgggcaatacggcgctctgcaccgtgggtaaaagtggcaatgacctgcattaccgcggctacgatattcttgatctggcgaaacattgcgaatttgaagaagtggcgcatctgctgatccacggcaaactgccgacccgtgacgaactcgccgcttacaaaacgaaactgaaagccctgcgcggtttaccggctaacgtgcgtaccgtgctggaagccttaccggcggcgtcgcacccgatggatgttatgcgcaccggtgtttccgcgctcggctgcacgctgccagaaaaagaggggcataccgtctctggcgcgcgggatattgccgacaaactgctggcgtcgcttagctcgattctcctttattggtatcactacagccacaacggcgaacgcatccaaccggaaaccgatgacgactccatcggcggtcacttcctgcatctgctgcacggcgaaaagccatcgcaaagctgggaaaaggcgatgcatatctcgctggtgctgtacgccgaacacgagtttaacgcctccacctttaccagtcgggtgattgcgggcaccggctctgatatgtattccgcgattattggcgcgattggcgcactgcgcgggccaaaacacggcggggcgaatgaagtgtcgctggagatccagcaacgctacgaaacgccggacgaagccgaagcagatatccgcaagcgcgtggaaaacaaagaagtggtcattggttttggtcatccggtttacaccatcgctgacccgcgccaccaggtgattaaacgtgtggcgaagcagctctcgcaggaaggcggctcgctgaagatgtacaacatcgccgatcgcctggaaacggtgatgtgggagagcaaaaagatgttccccaatctcgactggttctctgctgtttcctacaacatgatgggcgttcccaccgagatgttcacaccactgtttgttatcgcccgcgtcaccggctgggcggcgcacattatcgaacaacgtcaggacaacaaaattatccgtccttccgccaattatgttggaccggaagaccgcccgtttgtcgcgctggataagcgccagtaa

SEQ ID NO: 219 - DNA, 2676 bp, Escherichia coli
atgtcgtcaaccctacgagaagccagtaaggacacgttgcaggccaaagataaaacttaccactactacagcctgccgcttgctgctaaatcactgggcgatatcacccgtctacccaagtcactcaaagttttgctcgaaaacctgctgcgctggcaggatggtaactcggttaccgaagaggatatccacgcgctggcaggatggctgaaaaatgcccatgctgaccgtgaaattgcctaccgcccggcaagggtgctgatgcaggactttaccggcgtacctgccgttgttgatctggcggcaatgcgcgaagcggttaaacgcctcggcggcgatactgcaaaggttaacccgctctcaccggtcgacctggtcattgaccactcggtgaccgtcgatcgttttggtgatgatgaggcatttgaagaaaacgtacgcctggaaatggagcgcaaccacgaacgttatgtgttcctgaaatggggaaagcaagcgttcagtcggtttagcgtcgtgccgccaggcacaggcatttgccatcaggttaacctcgaatatctcggcaaagcagtgtggagtgaattgcaggacggtgaatggattgcttatccggatacactcgttggtactgactcgcacaccaccatgatcaacggccttggcgtgctggggtggggcgttggtgggatcgaagcagaagccgcaatgttaggccagccggtttccatgcttatcccggatgtagtgggcttcaaacttaccggaaaattacgtgaaggtattaccgccacagacctggttctcactgttacccaaatgctgcgcaaacatggcgtggtggggaaattcgtcgaattttatggtgatggtctggattcactaccgttggcggatcgcgccaccattgccaatatgtcgccagaatatggtgccacctgtggcttcttcccaatcgatgctgtaaccctcgattacatgcgtttaagcgggcgcagcgaagatcaggtcgagttggtcgaaaaatatgccaaagcgcagggcatgtggcgtaacccgggcgatgaaccaatttttaccagtacgttagaactggatatgaatgacgttgaagcgagcctggcagggcctaaacgcccacaggatcgcgttgcactgcccgatgtaccaaaagcatttgccgccagtaacgaactggaagtgaatgccacgcataaagatcgccagccggtcgattatgttatgaacggacatcagtatcagttacctgatggcgctgtggtcattgctgcgataacctcgtgcaccaacacctctaacccaagtgtgctgatggccgcaggcttgctggcgaaaaaagccgtaactctgggcctcaagcggcaaccatgggtcaaagcgtcgctggcaccgggttcgaaagtcgtttctgattatctggcaaaagcgaaactgacaccgtatctcgacgaactggggtttaaccttgtgggatacggttgtaccacctgtattggtaactctgggccgctgcccgatcctatcgaaacggcaatcaaaaaaagcgatttaaccgtcggtgcggtgctgtccggcaaccgtaactttgaaggccgtatccatccgctggttaaaactaactggctggcctcgccgccgctggtggttgcctatgcgctggcgggaaatatgaatatcaacctggcttctgagcctatcggccatgatcgcaaaggcgatccggtttatctgaaagatatctggccatcggcacaagaaattgcccgtgcggtagaacaagtctccacagaaatgttccgcaaagagtacgcagaagtttttgaaggcacagcagagtggaagggaattaacgtcacacgatccgatacctacggttggcaggaggactcaacctatattcgcttatcgcctttctttgatgaaatgcaggcaacaccagcaccagtggaagatattcacggtgcgcggatcctcgcaatgctgggggattcagtcaccactgaccatatctctccggcgggcagtattaagcccgacagcccagcgggtcgatatctacaaggtcggggtgttgagcgaaaagactttaactcctacggttcgcggcgtggtaaccatgaagtgatgatgcgcggcaccttcgccaatattcgcatccgtaatgaaatggtgcctggcgttgaaggggggatgacgcggcatttacctgacagcgacgtagtctctatttatgatgctgcgatgcgctataagcaggagcaaacgccgctggcggtgattgccgggaaagagtatggatcaggctccagtcgtgactgggcggcaaaaggtccgcgtctgcttggtattcgtgtggtgattgccgaatcgtttgaacgaattcaccgttcgaatttaattggcatgggcatcctgccgctggaatttccgcaaggcgtaacgcgtaaaacgttagggctaaccggggaagagaagattgatattggcgatctgcaaaacctacaacccggcgcgacggttccggtgacgcttacgcgcgcggatggtagccaggaagtcgtaccctgccgttgtcgtatcgacaccgcgacggagttgacctactaccagaacgacggcattttgcattatgtcattcgtaatatgttgaagtaa

SEQ ID NO: 220 - DNA, 2598 bp, Escherichia coli
gtgctagaagaataccgtaagcacgtagctgagcgtgccgctgaggggattgcgcccaaacccctggatgcaaaccaaatggccgcacttgtagagctgctgaaaaacccgcccgcgggcgaagaagaattcctgttagatctgttaaccaaccgtgttcccccaggcgtcgatgaagccgcctatgtcaaagcaggcttcctggctgctatcgcgaaaggcgaagccaaatcccctctgctgactccggaaaaagccatcgaactgctgggcaccatgcagggtggttacaacattcatccgctgatcgacgcgctggatgatgccaaactggcacctattgctgccaaagcactttctcacacgctgctgatgttcgataacttctatgacgtagaagagaaagcgaaagcaggcaacgaatatgcgaagcaggttatgcagtcctgggcggatgccgaatggttcctgaatcgcccggcgctggctgaaaaactgaccgttactgtcttcaaagtcactggcgaaactaacaccgatgacctttctccggcaccggatgcgtggtcacgcccggatatcccactgcacgcgctggcgatgctgaaaaacgcccgtgaaggtattgagccagaccagcctggtgttgttggtccgatcaagcaaatcgaagctctgcaacagaaaggtttcccgctggcgtacgtcggtgacgttgtgggtacgggttcttcgcgtaaatccgccactaactccgttctgtggtttatgggcgatgatattccacatgtgccgaacaaacgcggcggtggtttgtgcctcggcggtaaaattgcacccatcttctttaacacgatggaagacgcgggtgcactgccaatcgaagtcgacgtctctaacctgaacatgggcgacgtgattgacgtttacccgtacaaaggtgaagtgcgtaaccacgaaaccggcgaactgctggcgaccttcgaactgaaaaccgacgtgctgattgatgaagtgcgtgctggtggccgtattccgctgattatcgggcgtggcctgaccaccaaagcgcgtgaagcacttggtctgccgcacagtgatgtgttccgtcaggcgaaagatgtcgctgagagcgatcgcggcttctcgctggcgcaaaaaatggtaggccgtgcctgtggcgtgaaaggcattcgtccgggcgcgtactgtgaaccgaaaatgacttctgtaggttcccaggacaccaccggcccgatgacccgtgatgaactgaaagacctggcgtgcctgggcttctcggctgacctggtgatgcagtctttctgccacaccgcggcgtatccgaagccagttgacgtgaacacgcaccacacgctgccggacttcattatgaaccgtggcggtgtgtcgctgcgtccgggtgacggcgtcattcactcctggctgaaccgtatgctgctgccggataccgtcggtaccggtggtgactcccatacccgtttcccgatcggtatctctttcccggcgggttctggtctggtggcgtttgctgccgcaactggcgtaatgccgcttgatatgccggaatccgttctggtgcgcttcaaaggcaaaatgcagccgggcatcaccctgcgcgatctggtacacgctattccgctgtatgcgatcaaacaaggtctgctgaccgttgagaagaaaggcaagaaaaacatcttctctggccgcatcctggaaattgaaggtctgccggatctgaaagttgagcaggcctttgagctaaccgatgcgtccgccgagcgttctgccgctggttgtaccatcaagctgaacaaagaaccgatcatcgaatacctgaactctaacatcgtcctgctgaagtggatgatcgcggaaggttacggcgatcgtcgtaccctggaacgtcgtattcagggcatggaaaaatggctggcgaatcctgagctgctggaagccgatgcagatgcggaatacgcggcagtgatcgacatcgatctggcggatattaaagagccaatcctgtgtgctccgaacgacccggatgacgcgcgtccgctgtctgcggtacagggtgagaagatcgacgaagtgtttatcggttcctgcatgaccaacatcggtcacttccgtgctgcgggtaaactgctggatgcgcataaaggtcagttgccgacccgcctgtgggtggcaccgccaacccgtatggacgccgcacagttgaccgaagaaggctactacagcgtcttcggtaagagtggtgcgcgtatcgagatccctggctgttccctgtgtatgggtaaccaggcgcgtgtggcggacggtgcaacggtggtttccacctctacccgtaacttcccgaaccgtctgggtactggcgcgaatgtcttcctggcttctgcggaactggcggctgttgcggcgctgattggcaaactgccgacgccggaagagtaccagacctacgtggcgcaggtagataaaacagccgttgatacttaccgttatctgaacttcaaccagctttctcagtacaccgagaaagccgatggggtgattttccagactgcggtttaa

SEQ ID NO: 221 - DNA, 1251 bp, Escherichia coli
atggaaagtaaagtagttgttccggcacaaggcaagaagatcaccctgcaaaacggcaaactcaacgttcctgaaaatccgattatcccttacattgaaggtgatggaatcggtgtagatgtaaccccagccatgctgaaagtggtcgacgctgcagtcgagaaagcctataaaggcgagcgtaaaatctcctggatggaaatttacaccggtgaaaaatccacacaggtttatggtcaggacgtctggctgcctgctgaaactcttgatctgattcgtgaatatcgcgttgccattaaaggtccgctgaccactccggttggtggcggtattcgctctctgaacgttgccctgcgccaggaactggatctctacatctgcctgcgtccggtacgttactatcagggcactccaagcccggttaaacaccctgaactgaccgatatggttatcttccgtgaaaactcggaagacatttatgcgggtatcgaatggaaagcagactctgccgacgccgagaaagtgattaaattcctgcgtgaagagatgggggtgaagaaaattcgcttcccggaacattgtggtatcggtattaagccgtgttcggaagaaggcaccaaacgtctggttcgtgcagcgatcgaatacgcaattgctaacgatcgtgactctgtgactctggtgcacaaaggcaacatcatgaagttcaccgaaggagcgtttaaagactggggctaccagctggcgcgtgaagagtttggcggtgaactgatcgacggtggcccgtggctgaaagttaaaaacccgaacactggcaaagagatcgtcattaaagacgtgattgctgatgcattcctgcaacagatcctgctgcgtccggctgaatatgatgttatcgcctgtatgaacctgaacggtgactacatttctgacgccctggcagcgcaggttggcggtatcggtatcgcccctggtgcaaacatcggtgacgaatgcgccctgtttgaagccacccacggtactgcgccgaaatatgccggtcaggacaaagtaaatcctggctctattattctctccgctgagatgatgctgcgccacatgggttggaccgaagcggctgacttaattgttaaaggtatggaaggcgcaatcaacgcgaaaaccgtaacctatgacttcgagcgtctgatggatggcgctaaactgctgaaatgttcagagtttggtgacgcgatcatcgaaaacatgtaa

SEQ ID NO: 222 - DNA, 918 bp, Escherichia coli
atggaattaatttttttaggtacttcagccggtgtgccaacccgcacgcgcaatgtcacggcaatattgcttaacctgcaacatccgacccagagcggactttggttgtttgactgcggtgaaggcacccagcatcagctactgcataccgcctttaaccctggaaaactggacaagatttttatcagtcaccttcatggcgatcatctttttggtttacccggcttgctgtgcagtcgttctatgtcaggcattatccaacccttaacgatttatggtccgcaaggtatccgtgaatttgtggaaaccgcgctgcggattagcggctcatggaccgattatccgctggaaattgtcgaaattggcgctggcgaaattctcgatgatggcctgcgcaaagtaaccgcttatccgctggaacacccactggaatgttatggctatcgtattgaagaacatgataaaccgggtgcattaaatgcccaggcattaaaagctgctggcgtgccgcctggcccactgtttcaggaattaaaagcgggcaaaacaatcacgctggaagatggaaggcagattaacggcgcagattacttagctgctccagtgccaggtaaagcgctcgctattttcggcgataccggcccctgcgatgccgcacttgacctggctaaaggtgtcgatgtcatggtgcacgaagcgacgctggatataaccatggaagccaaagccaatagtcgcggccatagctctacacgccaggctgcgacactagcccgtgaggctggagtcggcaagctaatcattacccacgtcagctcgcgctatgatgacaaaggttgtcagcacctgttacgtgaatgcaggtcaattttcccggcgactgaactggcgaatgatttcaccgtgtttaacgtttaa

SEQ ID NO: 223 - DNA, 2802 bp, Escherichia coli
atgcagaacagcgctttgaaagcctggttggactcttcttacctctctggcgcaaaccagagctggatagaacagctctatgaagacttcttaaccgatcctgactcggttgacgctaactggcgttcgacgttccagcagttacctggtacgggagtcaaaccggatcaattccactctcaaacgcgtgaatatttccgccgcctggcgaaagacgcttcacgttactcttcaacgatctccgaccctgacaccaatgtgaagcaggttaaagtcctgcagctcattaacgcataccgcttccgtggtcaccagcatgcgaatctcgatccgctgggactgtggcagcaagataaagtggccgatctggatccgtctttccacgatctgaccgaagcagacttccaggagaccttcaacgtcggttcatttgccagcggcaaagaaaccatgaaactcggcgagctgctggaagccctcaagcaaacctactgcggcccgattggtgccgagtatatgcacattaccagcaccgaagaaaaacgctggatccaacagcgtatcgagtctggtcgcgcgactttcaatagcgaagagaaaaaacgcttcttaagcgaactgaccgccgctgaaggtcttgaacgttacctcggcgcaaaattccctggcgcaaaacgcttctcgctggaaggcggtgacgcgttaatcccgatgcttaaagagatgatccgccacgctggcaacagcggcacccgcgaagtggttctcgggatggcgcaccgtggtcgtctgaacgtgctggtgaacgtgctgggtaaaaaaccgcaagacttgttcgacgagttcgccggtaaacataaagaacacctcggcacgggtgacgtgaaataccacatgggcttctcgtctgacttccagaccgatggcggcctggtgcacctggcgctggcgtttaacccgtctcaccttgagattgtaagcccggtagttatcggttctgttcgtgcccgtctggacagacttgatgagccgagcagcaacaaagtgctgccaatcaccatccacggtgacgccgcagtgaccgggcagggcgtggttcaggaaaccctgaacatgtcgaaagcgcgtggttatgaagttggcggtacggtacgtatcgttatcaacaaccaggttggtttcaccacctctaatccgctggatgcccgttctacgccgtactgtactgatatcggtaagatggttcaggccccgattttccacgttaacgcggacgatccggaagccgttgcctttgtgacccgtctggcgctcgatttccgtaacacctttaaacgtgatgtcttcatcgacctggtgtgctaccgccgtcacggccacaacgaagccgacgagccgagcgcaacccagccgctgatgtatcagaaaatcaaaaaacatccgacaccgcgcaaaatctacgctgacaagctggagcaggaaaaagtggcgacgctggaagatgccaccgagatggttaacctgtaccgcgatgcgctggatgctggcgattgcgtagtggcagagtggcgtccgatgaacatgcactctttcacctggtcgccgtacctcaaccacgaatgggacgaagagtacccgaacaaagttgagatgaagcgcctgcaggagctggcgaaacgcatcagcacggtgccggaagcagttgaaatgcagtctcgcgttgccaagatttatggcgatcgccaggcgatggctgccggtgagaaactgttcgactggggcggtgcggaaaacctcgcttacgccacgctggttgatgaaggcattccggttcgcctgtcgggtgaagactccggtcgcggtaccttcttccaccgccacgcggtgatccacaaccagtctaacggttccacttacacgccgctgcaacatatccataacgggcagggcgcgttccgtgtctgggactccgtactgtctgaagaagcagtgctggcgtttgaatatggttatgccaccgcagaaccacgcactctgaccatctgggaagcgcagttcggtgacttcgccaacggtgcgcaggtggttatcgaccagttcatctcctctggcgaacagaaatggggccggatgtgtggtctggtgatgttgctgccgcacggttacgaagggcaggggccggagcactcctccgcgcgtctggaacgttatctgcaactttgtgctgagcaaaacatgcaggtttgcgtaccgtctaccccggcacaggtttaccacatgctgcgtcgtcaggcgctgcgcgggatgcgtcgtccgctggtcgtgatgtcgccgaaatccctgctgcgtcatccgctggcggtttccagcctcgaagaactggcgaacggcaccttcctgccagccatcggtgaaatcgacgagcttgatccgaagggcgtgaagcgcgtagtgatgtgttctggtaaggtttattacgacctgctggaacagcgtcgtaagaacaatcaacacgatgtcgccattgtgcgtatcgagcaactctacccgttcccgcataaagcgatgcaggaagtgttgcagcagtttgctcacgtcaaggattttgtctggtgccaggaagagccgctcaaccagggcgcatggtactgcagccagcatcatttccgtgaagtgattccgtttggggcttctctgcgttatgcaggccgcccggcctccgcctctccggcggtagggtatatgtccgttcaccagaaacagcaacaagatctggttaatgacgcgctgaacgtcgaataa

SEQ ID NO: 224 - DNA, 1218 bp, Escherichia coli
atgagtagcgtagatattctggtccctgacctgcctgaatccgtagccgatgccaccgtcgcaacctggcataaaaaacccggcgacgcagtcgtacgtgatgaagtgctggtagaaatcgaaactgacaaagtggtactggaagtaccggcatcagcagacggcattctggatgcggttctggaagatgaaggtacaacggtaacgtctcgtcagatccttggtcgcctgcgtgaaggcaacagcgccggtaaagaaaccagcgccaaatctgaagagaaagcgtccactccggcgcaacgccagcaggcgtctctggaagagcaaaacaacgatgcgttaagcccggcgatccgtcgcctgctggctgaacacaatctcgacgccagcgccattaaaggcaccggtgtgggtggtcgtctgactcgtgaagatgtggaaaaacatctggcgaaagccccggcgaaagagtctgctccggcagcggctgctccggcggcgcaaccggctctggctgcacgtagtgaaaaacgtgtcccgatgactcgcctgcgtaagcgtgtggcagagcgtctgctggaagcgaaaaactccaccgccatgctgaccacgttcaacgaagtcaacatgaagccgattatggatctgcgtaagcagtacggtgaagcgtttgaaaaacgccacggcatccgtctgggctttatgtccttctacgtgaaagcggtggttgaagccctgaaacgttacccggaagtgaacgcttctatcgacggcgatgacgtggtttaccacaactatttcgacgtcagcatggcggtttctacgccgcgcggcctggtgacgccggttctgcgtgatgtcgataccctcggcatggcagacatcgagaagaaaatcaaagagctggcagtcaaaggccgtgacggcaagctgaccgttgaagatctgaccggtggtaacttcaccatcaccaacggtggtgtgttcggttccctgatgtctacgccgatcatcaacccgccgcagagcgcaattctgggtatgcacgctatcaaagatcgtccgatggcggtgaatggtcaggttgagatcctgccgatgatgtacctggcgctgtcctacgatcaccgtctgatcgatggtcgcgaatccgtgggcttcctggtaacgatcaaagagttgctggaagatccgacgcgtctgctgctggacgtgtag

SEQ ID NO: 225 - DNA, 1167 bp, Escherichia coli
atgaacttacatgaatatcaggcaaaacaactttttgcccgctatggcttaccagcaccggtgggttatgcctgtactactccgcgcgaagcagaagaagccgcttcaaaaatcggtgccggtccgtgggtagtgaaatgtcaggttcacgctggtggccgcggtaaagcgggcggtgtgaaagttgtaaacagcaaagaagacatccgtgcttttgcagaaaactggctgggcaagcgtctggtaacgtatcaaacagatgccaatggccaaccggttaaccagattctggttgaagcagcgaccgatatcgctaaagagctgtatctcggtgccgttgttgaccgtagttcccgtcgtgtggtctttatggcctccaccgaaggcggcgtggaaatcgaaaaagtggcggaagaaactccgcacctgatccataaagttgcgcttgatccgctgactggcccgatgccgtatcagggacgcgagctggcgttcaaactgggtctggaaggtaaactggttcagcagttcaccaaaatcttcatgggcctggcgaccattttcctggagcgcgacctggcgttgatcgaaatcaacccgctggtcatcaccaaacagggcgatctgatttgcctcgacggcaaactgggcgctgacggcaacgcactgttccgccagcctgatctgcgcgaaatgcgtgaccagtcgcaggaagatccgcgtgaagcacaggctgcacagtgggaactgaactacgttgcgctggacggtaacatcggttgtatggttaacggcgcaggtctggcgatgggtacgatggacatcgttaaactgcacggcggcgaaccggctaacttccttgacgttggcggcggcgcaaccaaagaacgtgtaaccgaagcgttcaaaatcatcctctctgacgacaaagtgaaagccgttctggttaacatcttcggcggtatcgttcgttgcgacctgatcgctgacggtatcatcggcgcggtagcagaagtgggtgttaacgtaccggtcgtggtacgtctggaaggtaacaacgccgaactcggcgcgaagaaactggctgacagcggcctgaatattattgcagcaaaaggtctgacggatgcagctcagcaggttgttgccgcagtggaggggaaataa

SEQ ID NO: 226 - DNA, 870 bp, Escherichia coli
atgtccattttaatcgataaaaacaccaaggttatctgccagggctttaccggtagccaggggactttccactcagaacaggccattgcatacggcactaaaatggttggcggcgtaaccccaggtaaaggcggcaccacccacctcggcctgccggtgttcaacaccgtgcgtgaagccgttgctgccactggcgctaccgcttctgttatctacgtaccagcaccgttctgcaaagactccattctggaagccatcgacgcaggcatcaaactgattatcaccatcactgaaggcatcccgacgctggatatgctgaccgtgaaagtgaagctggatgaagcaggcgttcgtatgatcggcccgaactgcccaggcgttatcactccgggtgaatgcaaaatcggtatccagcctggtcacattcacaaaccgggtaaagtgggtatcgtttcccgttccggtacactgacctatgaagcggttaaacagaccacggattacggtttcggtcagtcgacctgtgtcggtatcggcggtgacccgatcccgggctctaactttatcgacattctcgaaatgttcgaaaaagatccgcagaccgaagcgatcgtgatgatcggtgagatcggcggtagcgctgaagaagaagcagctgcgtacatcaaagagcacgttaccaagccagttgtgggttacatcgctggtgtgactgcgccgaaaggcaaacgtatgggccacgcgggtgccatcattgccggtgggaaagggactgcggatgagaaattcgctgctctggaagccgcaggcgtgaaaaccgttcgcagcctggcggatatcggtgaagcactgaaaactgttctgaaataa

SEQ ID NO: 227 - DNA, 1305 bp, Escherichia coli
atgaaaacccgtacacaacaaattgaagaattacagaaagagtggactcaaccgcgttgggaaggcattactcgcccatacagtgcggaagatgtggtgaaattacgcggttcagtcaatcctgaatgcacgctggcgcaactgggcgcagcgaaaatgtggcgtctgctgcacggtgagtcgaaaaaaggctacatcaacagcctcggcgcactgactggcggtcaggcgctgcaacaggcgaaagcgggtattgaagcagtctatctgtcgggatggcaggtagcggcggacgctaacctggcggccagcatgtatccggatcagtcgctctatccggcaaactcggtgccagctgtggtggagcggatcaacaacaccttccgtcgtgccgatcagatccaatggtccgcgggcattgagccgggcgatccgcgctatgtcgattacttcctgccgatcgttgccgatgcggaagccggttttggcggtgtcctgaatgcctttgaactgatgaaagcgatgattgaagccggtgcagcggcagttcacttcgaagatcagctggcgtcagtgaagaaatgcggtcacatgggcggcaaagttttagtgccaactcaggaagctattcagaaactggtcgcggcgcgtctggcagctgacgtgacgggcgttccaaccctgctggttgcccgtaccgatgctgatgcggcggatctgatcacctccgattgcgacccgtatgacagcgaatttattaccggcgagcgtaccagtgaaggcttcttccgtactcatgcgggcattgagcaagcgatcagccgtggcctggcgtatgcgccatatgctgacctggtctggtgtgaaacctccacgccggatctggaactggcgcgtcgctttgcacaagctatccacgcgaaatatccgggcaaactgctggcttataactgctcgccgtcgttcaactggcagaaaaacctcgacgacaaaactattgccagcttccagcagcagctgtcggatatgggctacaagttccagttcatcaccctggcaggtatccacagcatgtggttcaacatgtttgacctggcaaacgcctatgcccagggcgagggtatgaagcactacgttgagaaagtgcagcagccggaatttgccgccgcgaaagatggctataccttcgtatctcaccagcaggaagtgggtacaggttacttcgataaagtgacgactattattcagggcggcacgtcttcagtcaccgcgctgaccggctccactgaagaatcgcagttctaa

SEQ ID NO: 228 - DNA, 1602 bp, Escherichia coli
atgactgaacaggcaacaacaaccgatgaactggctttcacaaggccgtatggcgagcaggagaagcaaattcttactgccgaagcggtagaatttctgactgagctggtgacgcattttacgccacaacgcaataaacttctggcagcgcgcattcagcagcagcaagatattgataacggaacgttgcctgattttatttcggaaacagcttccattcgcgatgctgattggaaaattcgcgggattcctgcggacttagaagaccgccgcgtagagataactggcccggtagagcgcaagatggtgatcaacgcgctcaacgccaatgtgaaagtctttatggccgatttcgaagattcactggcaccagactggaacaaagtgatcgacgggcaaattaacctgcgtgatgcggttaacggcaccatcagttacaccaatgaagcaggcaaaatttaccagctcaagcccaatccagcggttttgatttgtcgggtacgcggtctgcacttgccggaaaaacatgtcacctggcgtggtgaggcaatccccggcagcctgtttgattttgcgctctatttcttccacaactatcaggcactgttggcaaagggcagtggtccctatttctatctgccgaaaacccagtcctggcaggaagcggcctggtggagcgaagtcttcagctatgcagaagatcgctttaatctgccgcgcggcaccatcaaggcgacgttgctgattgaaacgctgcccgccgtgttccagatggatgaaatccttcacgcgctgcgtgaccatattgttggtctgaactgcggtcgttgggattacatcttcagctatatcaaaacgttgaaaaactatcccgatcgcgtcctgccagacagacaggcagtgacgatggataaaccattcctgaatgcttactcacgcctgttgattaaaacctgccataaacgcggtgcttttgcgatgggcggcatggcggcgtttattccgagcaaagatgaagagcacaataaccaggtgctcaacaaagtaaaagcggataaatcgctggaagccaataacggtcacgatggcacatggatcgctcacccaggccttgcggacacggcaatggcggtattcaacgacattctcggctcccgtaaaaatcagcttgaagtgatgcgcgaacaagacgcgccgattactgccgatcagctgctggcaccttgtgatggtgaacgcaccgaagaaggtatgcgcgccaacattcgcgtggctgtgcagtacatcgaagcgtggatctctggcaacggctgtgtgccgatttatggcctgatggaagatgcggcgacggctgaaatttcccgtacctcgatctggcagtggatccatcatcaaaaaacgttgagcaatggcaaaccggtgaccaaagccttgttccgccagatgctgggcgaagagatgaaagtcattgccagcgaactgggcgaagaacgtttctcccaggggcgttttgacgatgccgcacgcttgatggaacagatcaccacttccgatgagttaattgatttcctgaccctgccaggctaccgcctgttagcgtaa

SEQ ID NO: 229 - DNA, 1767 bp, Escherichia coli
atgaaattgccagtcagagaatttgatgcagttgtgattggtgccggtggcgcaggtatgcgcgcggcgctgcaaatttcccagagcggccagacctgtgcgctgctctctaaagtcttcccgacccgttcccataccgtttctgcgcaaggcggcattaccgttgcgctgggtaatacccatgaagataactgggaatggcatatgtacgacaccgtgaaagggtcggactatatcggtgaccaggacgcgattgaatatatgtgtaaaaccgggccggaagcgattctggaactcgaacacatgggcctgccgttctcgcgtctcgatgatggtcgtatctatcaacgtccgtttggcggtcagtcgaaaaacttcggcggcgagcaggcggcacgcactgcggcagcagctgaccgtaccggtcacgcactgttgcacacgctttatcagcagaacctgaaaaaccacaccaccattttctccgagtggtatgcgctggatctggtgaaaaaccaggatggcgcggtggtgggttgtaccgcactgtgcatcgaaaccggtgaagtggtttatttcaaagcccgcgctaccgtgctggcgactggcggagcagggcgtatttatcagtccaccaccaacgcccacattaacaccggcgacggtgtcggcatggctatccgtgccggcgtaccggtgcaggatatggaaatgtggcagttccacccgaccggcattgccggtgcgggcgtactggtcaccgaaggttgccgtggtgaaggcggttatctgctgaacaaacatggcgaacgttttatggagcgttatgcgccgaacgccaaagacctggcgggccgtgacgtggttgcgcgttccatcatgatcgaaatccgtgaaggtcgcggctgtgatggtccgtgggggccacacgcgaaactgaaactcgatcacctgggtaaagaagttctcgaatcccgtctgccgggtatcctggagctttcccgtaccttcgctcacgtcgatccggtgaaagagccgattccggttatcccaacctgtcactacatgatgggcggtattccgaccaaagttaccggtcaggcactgactgtgaatgagaaaggcgaagatgtggttgttccgggactgtttgccgttggtgaaatcgcttgtgtatcggtacacggcgctaaccgtctgggcggcaactcgctgctggacctggtggtctttggtcgcgcggcaggtctgcatctgcaagagtctatcgccgagcagggcgcactgcgcgatgccagcgagtctgatgttgaagcgtctctggatcgcctgaaccgctggaacaataatcgtaacggtgaagatccggtggcgatccgtaaagcgctgcaagaatgtatgcagcataacttctcggtcttccgtgaaggtgatgcgatggcgaaagggcttgagcagttgaaagtgatccgcgagcgtctgaaaaatgcccgtctggatgacacttccagcgagttcaacacccagcgcgttgagtgcctggaactggataacctgatggaaacggcgtatgcaacggctgtttctgccaacttccgtaccgaaagccgtggcgcgcatagccgcttcgacttcccggatcgtgatgatgaaaactggctgtgccactccctgtatctgccagagtcggaatccatgacgcgccgaagcgtcaacatggaaccgaaactgcgcccggcattcccgccgaagattcgtacttactaa

SEQ ID NO: 230 - DNA, 717 bp, Escherichia coli
atgagactcgagttttcaatttatcgctataacccggatgttgatgatgctccgcgtatgcaggattacaccctggaagcggatgaaggtcgcgacatgatgctgctggatgcgcttatccagctaaaagagaaagatcccagcctgtcgttccgccgctcctgccgtgaaggtgtgtgcggttccgacggtctgaacatgaacggcaagaatggtctggcctgtattaccccgatttcggcactcaaccagccgggcaagaagattgtgattcgcccgctgccaggtttaccggtgatccgcgatttggtggtagacatgggacaattctatgcgcaatatgagaaaattaagccttacctgttgaataatggacaaaatccgccagctcgcgagcatttacagatgccagagcagcgcgaaaaactcgacgggctgtatgaatgtattctctgcgcatgttgttcaacctcttgtccgtctttctggtggaatcccgataagtttatcggcccggcaggcttgttagcggcatatcgtttcctgattgatagccgtgataccgagactgacagccgcctcgacggtttgagtgatgcattcagcgtattccgctgtcacagcatcatgaactgcgtcagtgtatgtccgaaggggctgaacccgacgcgcgccatcggccatatcaagtcgatgttgttgcaacgtaatgcgtaa

SEQ ID NO: 231 - DNA, 390 bp, Escherichia coli
atgataagaaatgtgaaaaaacaaagacctgttaatctggacctacagaccatccggttccccatcacggcgatagcgtccattctccatcgcgtttccggtgtgatcacctttgttgcagtgggcatcctgctgtggcttctgggtaccagcctctcttcccctgaaggtttcgagcaagcttccgcgattatgggcagcttcttcgtcaaatttatcatgtggggcatccttaccgctctggcgtatcacgtcgtcgtaggtattcgccacatgatgatggattttggctatctggaagaaacattcgaagcgggtaaacgctccgccaaaatctcctttgttattactgtcgtgctttcacttctcgcaggagtcctcgtatggtaa

SEQ ID NO: 232 - DNA, 348 bp, Escherichia coli
atggtaagcaacgcctccgcattaggacgcaatggcgtacatgatttcatcctcgttcgcgctaccgctatcgtcctgacgctctacatcatttatatggtcggttttttcgctaccagtggcgagctgacatatgaagtctggatcggtttcttcgcctctgcgttcaccaaagtgttcaccctgctggcgctgttttctatcttgatccatgcctggatcggcatgtggcaggtgttgaccgactacgttaaaccgctggctttgcgcctgatgctgcaactggtgattgtcgttgcactggtggtttacgtgatttatggattcgttgtggtgtggggtgtgtga

SEQ ID NO: 233 - DNA, 1449 bp, Escherichia coli
atgaaacttaacgacagtaacttattccgccagcaggcgttgattaacggggaatggctggacgccaacaatggtgaagccatcgacgtcaccaatccggcgaacggcgacaagctgggtagcgtgccgaaaatgggcgcggatgaaacccgcgccgctatcgacgccgccaaccgcgccctgcccgcctggcgcgcgctcaccgccaaagaacgcgccaccattctgcgcaactggttcaatttgatgatggagcatcaggacgatttagcgcgcctgatgaccctcgaacagggtaaaccactggccgaagcgaaaggcgaaatcagctacgccgcctcctttattgagtggtttgccgaagaaggcaaacgcatttatggcgacaccattcctggtcatcaggccgataaacgcctgattgttatcaagcagccgattggcgtcaccgcggctatcacgccgtggaacttcccggcggcgatgattacccgcaaagccggtccggcgctggcagcaggctgcaccatggtgctgaagcccgccagtcagacgccgttctctgcgctggcgctggcggagctggcgatccgcgcgggcgttccggctggggtatttaacgtggtcaccggttcggcgggcgcggtcggtaacgaactgaccagtaacccgctggtgcgcaaactgtcgtttaccggttcgaccgaaattggccgccagttaatggaacagtgcgcgaaagacatcaagaaagtgtcgctggagctgggcggtaacgcgccgtttatcgtctttgacgatgccgacctcgacaaagccgtggaaggcgcgctggcctcgaaattccgcaacgccgggcaaacctgcgtctgcgccaaccgcctgtatgtgcaggacggcgtgtatgaccgttttgccgaaaaattgcagcaggcagtgagcaaactgcacatcggcgacgggctggataacggcgtcaccatcgggccgctgatcgatgaaaaagcggtagcaaaagtggaagagcatattgccgatgcgctggagaaaggcgcgcgcgtggtttgcggcggtaaagcgcacgaacgcggcggcaacttcttccagccgaccattctggtggacgttccggccaacgccaaagtgtcgaaagaagagacgttcggccccctcgccccgctgttccgctttaaagatgaagctgatgtgattgcgcaagccaatgacaccgagtttggccttgccgcctatttctacgcccgtgatttaagccgcgtcttccgcgtgggcgaagcgctggagtacggcatcgtcggcatcaataccggcattatttccaatgaagtggccccgttcggcggcatcaaagcctcgggtctgggtcgtgaaggttcgaagtatggcatcgaagattacttagaaatcaaatatatgtgcatcggtctttaa

SEQ ID NO: 234 - DNA, 1389 bp, Escherichia coli
atgaccattactccggcaactcatgcaatttcgataaatcctgccacgggtgaacaactttctgtgctgccgtgggctggcgctgacgatatcgaaaacgcacttcagctggcggcagcaggctttcgcgactggcgcgagacaaatatagattatcgtgctgaaaaactgcgtgatatcggtaaggctctgcgcgctcgtagcgaagaaatggcgcaaatgatcacccgcgaaatgggcaaaccaatcaaccaggcgcgcgctgaagtggcgaaatcggcgaatttgtgtgactggtatgcagaacatggtccggcaatgctgaaggcggaacctacgctggtggaaaatcagcaggcggttattgagtatcgaccgttggggacgattctggcgattatgccgtggaattttccgttatggcaggtgatgcgtggcgctgttcccatcattcttgcaggtaacggctacttacttaaacatgcgccgaatgtgatgggctgtgcacagctcattgcccaggtgtttaaagatgcgggtatcccacaaggcgtatatggctggctgaatgccgacaacgacggtgtcagtcagatgattaaagactcgcgcattgctgctgtcacggtgaccggaagtgttcgtgcgggagcggctattggcgcacaggctggagcggcactgaaaaaatgcgtactggaactgggcggttcggatccgtttattgtgcttaacgatgccgatctggaactggcggtgaaagcggcggtagccggacgttatcagaataccggacaggtatgtgcagcggcaaaacgctttattatcgaagagggaattgcttcggcatttaccgaacgttttgtggcagctgcggcagccttgaaaatgggcgatccccgtgacgaagagaacgctctcggaccaatggctcgttttgatttacgtgatgagctgcatcatcaggtggagaaaaccctggcgcagggtgcgcgtttgttactgggcggggaaaagatggctggggcaggtaactactatccgccaacggttctggcgaatgttaccccagaaatgaccgcgtttcgggaagaaatgtttggccccgttgcggcaatcaccattgcgaaagatgcagaacatgcactggaactggctaatgatagtgagttcggcctttcagcgaccatttttaccactgacgaaacacaggccagacagatggcggcacgtctggaatgcggtggggtgtttatcaatggttattgtgccagcgacgcgcgagtggcctttggtggcgtgaaaaagagtggctttggtcgtgagctttcccatttcggcttacacgaattctgtaatatccagacggtgtggaaagaccggatctga

SEQ ID NO: 235 - DNA, 1440 bp, Escherichia coli
atgtcagtacccgttcaacatcctatgtatatcgatggacagtttgttacctggcgtggagacgcatggattgatgtggtaaaccctgctacagaggctgtcatttcccgcatacccgatggtcaggccgaggatgcccgtaaggcaatcgatgcagcagaacgtgcacaaccagaatgggaagcgttgcctgctattgaacgcgccagttggttgcgcaaaatctccgccgggatccgcgaacgcgccagtgaaatcagtgcgctgattgttgaagaagggggcaagatccagcagctggctgaagtcgaagtggcttttactgccgactatatcgattacatggcggagtgggcacggcgttacgagggcgagattattcaaagcgatcgtccaggagaaaatattcttttgtttaaacgtgcgcttggtgtgactaccggcattctgccgtggaacttcccgttcttcctcattgcccgcaaaatggctcccgctcttttgaccggtaataccatcgtcattaaacctagtgaatttacgccaaacaatgcgattgcattcgccaaaatcgtcgatgaaataggccttccgcgcggcgtgtttaaccttgtactggggcgtggtgaaaccgttgggcaagaactggcgggtaacccaaaggtcgcaatggtcagtatgacaggcagcgtctctgcaggtgagaagatcatggcgactgcggcgaaaaacatcaccaaagtgtgtctggaattggggggtaaagcaccagctatcgtaatggacgatgccgatcttgaactggcagtcaaagccatcgttgattcacgcgtcattaatagtgggcaagtgtgtaactgtgcagaacgtgtttatgtacagaaaggcatttatgatcagttcgtcaatcggctgggtgaagcgatgcaggcggttcaatttggtaaccccgctgaacgcaacgacattgcgatggggccgttgattaacgccgcggcgctggaaagggtcgagcaaaaagtggcgcgcgcagtagaagaaggggcgagagtggcgttcggtggcaaagcggtagaggggaaaggatattattatccgccgacattgctgctggatgttcgccaggaaatgtcgattatgcatgaggaaacctttggcccggtgctgccagttgtcgcatttgacacgctggaagatgctatctcaatggctaatgacagtgattacggcctgacctcatcaatctatacccaaaatctgaacgtcgcgatgaaagccattaaagggctgaagtttggtgaaacttacatcaaccgtgaaaacttcgaagctatgcaaggcttccacgccggatggcgtaaatccggtattggcggcgcagatggtaaacatggcttgcatgaatatctgcagacccaggtggtttatttacagtcttaa

SEQ ID NO: 236 - DNA, 1647 bp, Escherichia coli
atgtcaaacaaaccctttcattatcaggctccttttccactcaaaaaagatgatactgagtattacctgctaaccagcgaacacgttagcgtatctgaatttgaagggcaggagattttgaaagtcgcacccgaagcgttaactctgttggcgcgccaggcgtttcatgatgcgtcgttcatgctgcgtccggcgcaccaacaacaggtggccgacattctgcgtgacccggaggccagcgaaaatgataaatatgtggcgctgcaattcctgcgtaactccgacatcgcggcgaaaggcgttctgccaacctgtcaggataccggcaccgcgattattgttggtaaaaaagggcagcgtgtatggaccggtggtggtgatgaagcggcgctggcgcgcggtgtctataacacttatatcgaagataatctgcgctactcgcaaaacgcgccgctggatatgtataaagaagtgaataccggcaccaatctgccagcgcagatcgatctttatgccgttgatggcgacgaatacaaattcctctgtatcgccaaaggtggtggttcggcaaacaagacgtatctctatcaggaaaccaaagcgttactgacgccggggaaactgaaaaattacctggttgagaagatgcgcacgctgggtacggcggcctgtcctccgtatcatattgcgttcgttattggtggaacttctgcagaaacgaaccttaaaacggtgaaactggcttccgcgaaatactatgatgaactgccaacggaagggaatgagcacggtcaggcgttccgcgatgtggaactggaaaaagaattgctgatcgaagcgcaaaatcttggtctgggtgcgcagtttggtggtaaatacttcgctcacgacatccgcgtgattcgcctgccacgtcacggcgcatcctgcccggtcggtatgggcgtctcctgctctgctgaccgtaatatcaaagcgaagatcaaccgtcaggggatctggatcgaaaaactggaacataatccaggcaaatatatcccggaagagctgcgcaaagcgggagaaggcgaagcggtgcgcgttgaccttaaccgtccgatgaaagagatcctcgcacagttgtcgcagtatcccgtttctacacgcttatcgcttaacggcacgattatcgtcggtcgtgatattgctcacgccaaactgaaagagcggatggataacggtgaagggctgccgcagtacatcaaagatcatccgatttactacgcgggtccggccaaaacgccggaaggttatgcctccggttctcttggcccaacgaccgccggacggatggattcttatgtcgatcaactgcaagcgcagggcggaagtatgatcatgctggcgaaaggcaaccgcagccagcaggtgacggatgcctgtaaaaaacacggcggcttctaccttggcagtatcggtggtccggccgctgtattggcgcagggaagtattaagagcctggaatgtgttgaatatccggaactgggaatggaagccatctggaaaattgaagtggaagatttcccggcgtttatccttgtggatgataaaggaaatgacttcttccagcagatacaactcacacaatgcacccgctgtgtgaaataa

SEQ ID NO: 237 - DNA, 1647 bp, Escherichia coli
atgtcaaacaaaccctttatctaccaggcacctttcccgatggggaaagacaataccgaatactatctactcacttccgattacgttagcgttgccgacttcgacggcgaaaccatcctgaaagtggaaccagaagccctgaccctgctggcgcagcaagcctttcacgacgcttcttttatgctccgcccggcacaccagaaacaggttgcggctattcttcacgatccagaagccagcgaaaacgacaagtacgtggcgctgcaattcttaagaaactccgaaatcgccgccaaaggcgtgctgccgacctgccaggataccggcaccgcgatcatcgtcggtaaaaaaggccagcgcgtgtggaccggcggcggtgatgaagaaacgctgtcgaaaggcgtctataacacctatatcgaagataacctgcgctattcacagaatgcggcgctggacatgtacaaagaggtcaacaccggcactaacctgcctgcgcaaatcgacctgtacgcggtagatggcgatgagtacaaattcctttgcgttgcgaaaggcggcggctctgccaacaaaacgtatctctaccaggaaaccaaagccctgctgactcccggcaaactgaaaaacttcctcgtcgagaaaatgcgtaccctcggtactgcagcctgcccgccgtaccatatcgcgtttgtgattggcggtacgtctgcggaaaccaacctgaaaaccgtcaagttagcaagcgctcactattacgatgaactgccgacggaagggaacgaacatggtcaggcgttccgcgatgtccagctggaacaggaactgctggaagaggcccagaaactcggtcttggcgcgcagtttggcggtaaatacttcgcgcacgacattcgcgttatccgtctgccacgtcacggcgcatcctgcccggtcggcatgggcgtctcctgctccgctgaccgtaacattaaagcgaaaatcaaccgcgaaggtatctggatcgaaaaactggaacacaacccaggccagtacattccacaagaactgcgccaggccggtgaaggcgaagcggtgaaagttgaccttaaccgcccgatgaaagagatcctcgcccagctttcgcaatacccggtatccactcgtttgtcgctcaccggcaccattatcgtgggccgagatattgcacacgccaagctgaaagagctgattgacgccggtaaagaacttccgcagtacatcaaagatcacccgatctactacgcgggtccggcgaaaacccctgccggttatccatcaggttcacttggcccaaccaccgcaggccgtatggactcctacgtggatctgctgcaatcccacggcggcagcatgatcatgctggcgaaaggtaaccgcagtcagcaggttaccgacgcgtgtcataaacacggcggcttctacctcggtagcatcggcggtccggcggcggtactggcgcagcagagcatcaagcatctggagtgcgtcgcttatccggagctgggtatggaagctatctggaaaatcgaagtagaagatttcccggcgtttatcctggtcgatgacaaaggtaacgacttcttccagcaaatcgtcaacaaacagtgcgcgaactgcactaagtaa

SEQ ID NO: 238 - DNA, 1404 bp, Escherichia coli
atgaatacagtacgcagcgaaaaagattcgatgggggcgattgatgtcccggcagataagctgtggggcgcacaaactcaacgctcgctggagcatttccgcatttcgacggagaaaatgcccacctcactgattcatgcgctggcgctaaccaagcgtgcagcggcaaaagttaatgaagatttaggcttgttgtctgaagagaaagcgagcgccattcgtcaggcggcggatgaagtactggcaggacagcatgacgacgaattcccgctggctatctggcagaccggctccggcacgcaaagtaacatgaacatgaacgaagtgctggctaaccgggccagtgaattactcggcggtgtgcgcgggatggaacgtaaagttcaccctaacgacgacgtgaacaaaagccaaagttccaacgatgtctttccgacggcgatgcacgttgcggcgctgctggcgctgcgcaagcaactcattcctcagcttaaaaccctgacacagacactgaatgagaaatcccgtgcttttgccgatatcgtcaaaattggtcgtactcacttgcaggatgccacgccgttaacgctggggcaggagatttccggctgggtagcgatgctcgagcataatctcaaacatatcgaatacagcctgcctcacgtagcggaactggctcttggcggtacagcggtgggtactggactaaatacccatccggagtatgcgcgtcgcgtagcagatgaactggcagtcattacctgtgcaccgtttgttaccgcgccgaacaaatttgaagcgctggcgacctgtgatgccctggttcaggcgcacggcgcgttgaaagggttggctgcgtcactgatgaaaatcgccaatgatgtccgctggctggcctctggcccgcgctgcggaattggtgaaatctcaatcccggaaaatgagccgggcagctcaatcatgccggggaaagtgaacccaacacagtgtgaggcattaaccatgctctgctgtcaggtgatggggaacgacgtggcgatcaacatggggggcgcttccggtaactttgaactgaacgtcttccgtccaatggtgatccacaatttcctgcaatcggtgcgcttgctggcagatggcatggaaagttttaacaaacactgcgcagtgggtattgaaccgaatcgtgagcgaatcaatcaattactcaatgaatcgctgatgctggtgactgcgcttaacacccacattggttatgacaaagccgccgagatcgccaaaaaagcgcataaagaagggctgaccttaaaagctgcggcccttgcgctggggtatcttagcgaagccgagtttgacagctgggtacggccagaacagatggtcggcagtatgaaagccgggcgttaa

SEQ ID NO: 239 - DNA, 1191 bp, Escherichia coli
atgtttgagaacattaccgccgctcctgccgacccgattctgggcctggccgatctgtttcgtgccgatgaacgtcccggcaaaattaacctcgggattggtgtctataaagatgagacgggcaaaaccccggtactgaccagcgtgaaaaaggctgaacagtatctgctcgaaaatgaaaccaccaaaaattacctcggcattgacggcatccctgaatttggtcgctgcactcaggaactgctgtttggtaaaggtagcgccctgatcaatgacaaacgtgctcgcacggcacagactccggggggcactggcgcactacgcgtggctgccgatttcctggcaaaaaataccagcgttaagcgtgtgtgggtgagcaacccaagctggccgaaccataagagcgtctttaactctgcaggtctggaagttcgtgaatacgcttattatgatgcggaaaatcacactcttgacttcgatgcactgattaacagcctgaatgaagctcaggctggcgacgtagtgctgttccatggctgctgccataacccaaccggtatcgaccctacgctggaacaatggcaaacactggcacaactctccgttgagaaaggctggttaccgctgtttgacttcgcttaccagggttttgcccgtggtctggaagaagatgctgaaggactgcgcgctttcgcggctatgcataaagagctgattgttgccagttcctactctaaaaactttggcctgtacaacgagcgtgttggcgcttgtactctggttgctgccgacagtgaaaccgttgatcgcgcattcagccaaatgaaagcggcgattcgcgctaactactctaacccaccagcacacggcgcttctgttgttgccaccatcctgagcaacgatgcgttacgtgcgatttgggaacaagagctgactgatatgcgccagcgtattcagcgtatgcgtcagttgttcgtcaatacgctgcaggaaaaaggcgcaaaccgcgacttcagctttatcatcaaacagaacggcatgttctccttcagtggcctgacaaaagaacaagtgctgcgtctgcgcgaagagtttggcgtatatgcggttgcttctggtcgcgtaaatgtggccgggatgacaccagataacatggctccgctgtgcgaagcgattgtggcagtgctgtaa

SEQ ID NO: 240 - DNA, 939 bp, Escherichia coli
atgaaagtcgcagtcctcggcgctgctggcggtattggccaggcgcttgcactactgttaaaaacccaactgccttcaggttcagaactctctctgtatgatatcgctccagtgactcccggtgtggctgtcgatctgagccatatccctactgctgtgaaaatcaaaggtttttctggtgaagatgcgactccggcgctggaaggcgcagatgtcgttcttatctctgcaggcgtagcgcgtaaaccgggtatggatcgttccgacctgtttaacgttaacgccggcatcgtgaaaaacctggtacagcaagttgcgaaaacctgcccgaaagcgtgcattggtattatcactaacccggttaacaccacagttgcaattgctgctgaagtgctgaaaaaagccggtgtttatgacaaaaacaaactgttcggcgttaccacgctggatatcattcgttccaacacctttgttgcggaactgaaaggcaaacagccaggcgaagttgaagtgccggttattggcggtcactctggtgttaccattctgccgctgctgtcacaggttcctggcgttagttttaccgagcaggaagtggctgatctgaccaaacgcatccagaacgcgggtactgaagtggttgaagcgaaggccggtggcgggtctgcaaccctgtctatgggccaggcagctgcacgttttggtctgtctctggttcgtgcactgcagggcgaacaaggcgttgtcgaatgtgcctacgttgaaggcgacggtcagtacgcccgtttcttctctcaaccgctgctgctgggtaaaaacggcgtggaagagcgtaaatctatcggtaccctgagcgcatttgaacagaacgcgctggaaggtatgctggatacgctgaagaaagatatcgccctgggcgaagagttcgttaataagtaa

SEQ ID NO: 241 - DNA, 1071 bp, Escherichia coli
atgcaaaaagacgcgctgaataacgtacatattaccgacgaacaggttttaatgactccggaacaactgaaggccgcttttccattgagcctgcaacaagaagcccagattgctgactcgcgtaaaagcatttcagatattatcgccgggcgcgatcctcgtctgctggtagtatgtggtccttgttccattcatgatccggaaactgctctggaatatgctcgtcgatttaaagcccttgccgcagaggtcagcgatagcctctatctggtaatgcgcgtctattttgaaaaaccccgtaccactgtcggctggaaagggttaattaacgatccccatatggatggctcttttgatgtagaagccgggctgcagatcgcgcgtaaattgctgcttgagctggtgaatatgggactgccactggcgacggaagcgttagatccgaatagcccgcaatacctgggcgatctgtttagctggtcagcaattggtgctcgtacaacggaatcgcaaactcaccgtgaaatggcctccgggctttccatgccggttggttttaaaaacggcaccgacggcagtctggcaacagcaattaacgctatgcgcgccgccgcccagccgcaccgttttgttggcattaaccaggcagggcaggttgcgttgctacaaactcaggggaatccggacggccatgtgatcctgcgcggtggtaaagcgccgaactatagccctgcggatgttgcgcaatgtgaaaaagagatggaacaggcgggactgcgcccgtctctgatggtagattgcagccacggtaattccaataaagattatcgccgtcagcctgcggtggcagaatccgtggttgctcaaatcaaagatggcaatcgctcaattattggtctgatgatcgaaagtaatatccacgagggcaatcagtcttccgagcaaccgcgcagtgaaatgaaatacggtgtatccgtaaccgatgcctgcattagctgggaaatgaccgatgccttgctgcgtgaaattcatcaggatctgaacgggcagctgacggctcgcgtggcttaa

SEQ ID NO: 242 - DNA, 1053 bp, Escherichia coli
atgaattatcagaacgacgatttacgcatcaaagaaatcaaagagttacttcctcctgtcgcattgctggaaaaattccccgctactgaaaatgccgcgaatacggttgcccatgcccgaaaagcgatccataagatcctgaaaggtaatgatgatcgcctgttggttgtgattggcccatgctcaattcatgatcctgtcgcggcaaaagagtatgccactcgcttgctggcgctgcgtgaagagctgaaagatgagctggaaatcgtaatgcgcgtctattttgaaaagccgcgtaccacggtgggctggaaagggctgattaacgatccgcatatggataatagcttccagatcaacgacggtctgcgtatagcccgtaaattgctgcttgatattaacgacagcggtctgccagcggcaggtgagtttctcgatatgatcaccccacaatatctcgctgacctgatgagctggggcgcaattggcgcacgtaccaccgaatcgcaggtgcaccgcgaactggcatcagggctttcttgtccggtcggcttcaaaaatggcaccgacggtacgattaaagtggctatcgatgccattaatgccgccggtgcgccgcactgcttcctgtccgtaacgaaatgggggcattcggcgattgtgaataccagcggtaacggcgattgccatatcattctgcgcggcggtaaagagcctaactacagcgcgaagcacgttgctgaagtgaaagaagggctgaacaaagcaggcctgccagcacaggtgatgatcgatttcagccatgctaactcgtccaaacaattcaaaaagcagatggatgtttgtgctgacgtttgccagcagattgccggtggcgaaaaggccattattggcgtgatggtggaaagccatctggtggaaggcaatcagagcctcgagagcggggagccgctggcctacggtaagagcatcaccgatgcctgcatcggctgggaagataccgatgctctgttacgtcaactggcgaatgcagtaaaagcgcgtcgcgggtaa

SEQ ID NO: 243 - DNA, 1047 bp, Escherichia coli
atgaacagaactgacgaactccgtactgcgcgtattgagagcctggtaacgcccgccgaactcgcgctacggtatcccgtaacgcctggcgtcgccacccatgtcaccgactcccgccgcagaattgaaaaaatactgaatggtgaagataagcgactgttggtcattattggcccctgctcgatccacgatctcaccgctgcaatggagtacgccacccgtctgcagtcgctgcgcaaccagtaccagtcacggctggaaatcgtaatgcgcacctattttgaaaaaccacgaactgttgtcggctggaaaggactaatctccgatccagatttaaacggcagctatcgggtaaatcacggtctggagctggcgcgcaaattacttttacaggtaaatgagctgggcgtcccaaccgcgaccgagttcctcgatatggtgaccggtcagtttattgctgatttaatcagttggggcgcgattggcgcacgtactaccgaaagtcagatccaccgcgaaatggcttcggcactctcctgtccggtaggttttaaaaatggtaccgatggcaatacgcggattgctgtggatgctatccgcgcagcccgcgccagccatatgttcctctcgccagacaaaaatggtcagatgaccatctatcagaccagcggcaacccgtatggccacattattatgcgtggcggcaaaaaaccgaattatcatgccgatgatatcgccgcagcctgcgatacgctgcacgagtttgatttacctgaacatctggtggtggatttcagccacggtaactgccagaagcagcaccgtcgccagttagaagtttgtgaggatatttgtcagcaaatccgcaatggctctacggcgattgctggaattatggcggaaagtttcctgcgcgaaggaacgcaaaaaatcgtcggcagtcagccgctcacttacggtcaatccattaccgacccgtgtctgggctgggaggataccgaacgcctggtcgaaaaactcgcctctgcggtagatacccgcttctga

SEQ ID NO: 244 - DNA, 1089 bp, Escherichia coli
atggagaggattgtcgttactctcggggaacgtagttacccaattaccatcgcatctggtttgtttaatgaaccagcttcattcttaccgctgaaatcgggcgagcaggtcatgttggtcaccaacgaaaccctggctcctctgtatctcgataaggtccgcggcgtacttgaacaggcgggtgttaacgtcgatagcgttatcctccctgacggcgagcagtataaaagcctggctgtactcgataccgtctttacggcgttgttacaaaaaccgcatggtcgcgatactacgctggtggcgcttggcggcggcgtagtgggcgatctgaccggcttcgcggcggcgagttatcagcgcggtgtccgtttcattcaagtcccgacgacgttactgtcgcaggtcgattcctccgttggcggcaaaactgcggtcaaccatcccctcggtaaaaacatgattggcgcgttctaccaacctgcttcagtggtggtggatctcgactgtctgaaaacgcttcccccgcgtgagttagcgtcggggctggcagaagtcatcaaatacggcattattcttgacggtgcgttttttaactggctggaagagaatctggatgcgttgttgcgtctggacggtccggcaatggcgtactgtattcgccgttgttgtgaactgaaggcagaagttgtcgccgccgacgagcgcgaaaccgggttacgtgctttactgaatctgggacacacctttggtcatgccattgaagctgaaatggggtatggcaattggttacatggtgaagcggtcgctgcgggtatggtgatggcggcgcggacgtcggaacgtctcgggcagtttagttctgccgaaacgcagcgtattataaccctgctcaagcgggctgggttaccggtcaatgggccgcgcgaaatgtccgcgcaggcgtatttaccgcatatgctgcgtgacaagaaagtccttgcgggagagatgcgcttaattcttccgttggcaattggtaagagtgaagttcgcagcggcgtttcgcacgagcttgttcttaacgccattgccgattgtcaatcagcgtaa

SEQ ID NO: 245 - DNA, 759 bp, Escherichia coli
atgaaaaccgtaactgtaaaagatctcgtcattggtacgggcgcacctaaaatcatcgtctcgctgatggcgaaagatatcgccagcgtgaaatccgaagctctcgcctatcgtgaagcggactttgatattctggaatggcgtgtggaccactatgccgacctctccaatgtggagtctgtcatggcggcagcaaaaattctccgtgagaccatgccagaaaaaccgctgctgtttaccttccgcagtgccaaagaaggcggcgagcaggcgatttccaccgaggcttatattgcactcaatcgtgcagccatcgacagcggcctggttgatatgatcgatctggagttatttaccggtgatgatcaggttaaagaaaccgtcgcctacgcccacgcgcatgatgtgaaagtagtcatgtccaaccatgacttccataaaacgccggaagccgaagaaatcattgcccgtctgcgcaaaatgcaatccttcgacgccgatattcctaagattgcgctgatgccgcaaagtaccagcgatgtgctgacgttgcttgccgcgaccctggagatgcaggagcagtatgccgatcgtccaattatcacgatgtcgatggcaaaaactggcgtaatttctcgtctggctggtgaagtatttggctcggcggcaacttttggtgcggtaaaaaaagcgtctgcgccagggcaaatctcggtaaatgatttgcgcacggtattaactattttacaccaggcataa

SEQ ID NO: 246 - DNA, 867 bp, Escherichia coli
atggatgttaccgcaaaatacgaattgattgggttgatggcctatcctatccgccacagtttatcgcccgaaatgcagaataaagccttagaaaaagcgggattgccatttacctatatggccttcgaagtggataacgatagctttcctggagcaattgaaggattaaaagccctcaaaatgcgcggaactggtgtatcgatgccgaacaaacaactggcgtgtgaatatgttgatgaattaacaccagctgccaaactggtgggggccatcaacaccatcgttaatgatgatggctatctgcgtggctataacaccgacggcacgggccatattcgcgccattaaagagagcggttttgatatcaaaggcaaaacgatggtgctgttaggggccggtggtgcctcaacggcaattggcgcgcagggggcaattgaaggtttaaaagaaattaaactctttaaccgtcgggatgagttcttcgataaagccctcgccttcgcgcagcgggttaatgaaaacaccgattgtgtcgtcacggtcaccgatctcgccgatcagcaagcctttgctgaagccctggcttccgccgacattttaaccaatggcacaaaagtgggtatgaaaccccttgagaatgaatcattggttaatgatatcagtctgttacatccgggacttctggtcactgaatgcgtgtataacccgcatatgacgaagttattgcagcaggcgcaacaagctggttgcaaaacgattgatggatacggcatgttgttgtggcaaggggctgaacagttcacattatggactggcaaagatttccctctggaatatgttaaacaggtcatggggttcggtgcctga

SEQ ID NO: 247 - DNA, 819 bp, Escherichia coli
atggaaacctatgctgtttttggtaatccgatagcccacagcaaatcgccattcattcatcagcaatttgctcagcaactgaatattgaacatccctatgggcgcgtgttggcacccatcaatgatttcatcaacacactgaacgctttctttagtgctggtggtaaaggtgcgaatgtgacggtgccttttaaagaagaggcttttgccagagcggatgagcttactgaacgggcagcgttggctggtgctgttaataccctcatgcggttagaagatggacgcctgctgggtgacaataccgatggtgtaggcttgttaagcgatctggaacgtctgtcttttatccgccctggtttacgtattctgcttatcggcgctggtggagcatctcgcggcgtactactgccactcctttccctggactgtgcggtgacaataactaatcggacggtatcccgcgcggaagagttggctaaattgtttgcgcacactggcagtattcaggcgttgagtatggacgaactggaaggtcatgagtttgatctcattattaatgcaacatccagtggcatcagtggtgatattccggcgatcccgtcatcgctcattcatccaggcatttattgctatgacatgttctatcagaaaggaaaaactccttttctggcatggtgtgagcagcgaggctcaaagcgtaatgctgatggtttaggaatgctggtggcacaggcggctcatgcctttcttctctggcacggtgttctgcctgacgtagaaccagttataaagcaattgcaggaggaattgtccgcgtga

SEQ ID NO: 248 - DNA, 522 bp, Escherichia coli
atggcagagaaacgcaatatctttctggttgggcctatgggtgccggaaaaagcactattgggcgccagttagctcaacaactcaatatggaattttacgattccgatcaagagattgagaaacgaaccggagctgatgtgggctgggttttcgatttagaaggcgaagaaggcttccgcgatcgcgaagaaaaggtcatcaatgagttgaccgagaaacagggtattgtgctggctactggcggcggctctgtgaaatcccgtgaaacgcgtaaccgtctttccgctcgtggcgttgtcgtttatcttgaaacgaccatcgaaaagcaacttgcacgcacgcagcgtgataaaaaacgcccgttgctgcacgttgaaacaccgccgcgtgaagttctggaagcgttggccaatgaacgcaatccgctgtatgaagagattgccgacgtgaccattcgtactgatgatcaaagcgctaaagtggttgcaaaccagattattcacatgctggaaagcaactaa

SEQ ID NO: 249 - DNA, 525 bp, Escherichia coli
atgacacaacctctttttctgatcgggcctcggggctgtggtaaaacaacggtcggaatggcccttgccgattcgcttaaccgtcggtttgtcgataccgatcagtggttgcaatcacagctcaatatgacggtcgcggagatcgtcgaaagggaagagtgggcgggatttcgcgccagagaaacggcggcgctggaagcggtaactgcgccatccaccgttatcgctacaggcggcggcattattctgacggaatttaatcgtcacttcatgcaaaataacgggatcgtggtttatttgtgtgcgccagtatcagtcctggttaaccgactgcaagctgcaccggaagaagatttacggccaaccttaacgggaaaaccgctgagcgaagaagttcaggaagtgctggaagaacgcgatgcgctatatcgcgaagttgcgcatattatcatcgacgcaacaaacgaacccagccaggtgatttctgaaattcgcagcgccctggcacagacgatcaattgttga

SEQ ID NO: 250 - DNA, 1284 bp, Escherichia coli
atggaatccctgacgttacaacccatcgctcgtgtcgatggcactattaatctgcccggttccaagagcgtttctaaccgcgctttattgctggcggcattagcacacggcaaaacagtattaaccaatctgctggatagcgatgacgtgcgccatatgctgaatgcattaacagcgttaggggtaagctatacgctttcagccgatcgtacgcgttgcgaaattatcggtaacggcggtccattacacgcagaaggtgccctggagttgttcctcggtaacgccggaacggcaatgcgtccgctggcggcagctctttgtctgggtagcaatgatattgtgctgaccggtgagccgcgtatgaaagaacgcccgattggtcatctggtggatgcgctgcgcctgggcggggcgaagatcacttacctggaacaagaaaattatccgccgttgcgtttacagggcggctttactggcggcaacgttgacgttgatggctccgtttccagccaattcctcaccgcactgttaatgactgcgcctcttgcgccggaagatacggtgattcgtattaaaggcgatctggtttctaaaccttatatcgacatcacactcaatctgatgaagacgtttggtgttgaaattgaaaatcagcactatcaacaatttgtcgtaaaaggcgggcagtcttatcagtctccgggtacttatttggtcgaaggcgatgcatcttcggcttcttactttctggcagcagcagcaatcaaaggcggcactgtaaaagtgaccggtattggacgtaacagtatgcagggtgatattcgctttgctgatgtgctggaaaaaatgggcgcgaccatttgctggggcgatgattatatttcctgcacgcgtggtgaactgaacgctattgatatggatatgaaccatattcctgatgcggcgatgaccattgccacggcggcgttatttgcaaaaggcaccaccacgctgcgcaatatctataactggcgtgttaaagagaccgatcgcctgtttgcgatggcaacagaactgcgtaaagtcggcgcggaagtggaagaggggcacgattacattcgtatcactcctccggaaaaactgaactttgccgagatcgcgacatacaatgatcaccggatggcgatgtgtttctcgctggtggcgttgtcagatacaccagtgacgattcttgatcccaaatgcacggccaaaacatttccggattatttcgagcagctggcgcggattagccaggcagcctga

SEQ ID NO: 251 - DNA, 1086 bp, Escherichia coli
atggctggaaacacaattggacaactctttcgcgtaaccaccttcggcgaatcgcacgggctggcgctcggctgcatcgtcgatggtgttccgccaggcattccgctgacggaagcggacctgcaacatgacctcgaccgtcgtcgccctgggacatcgcgctataccacccagcgccgcgagccggatcaggtcaaaattctctccggtgtttttgaaggcgttactaccggcaccagcattggcttgttgatcgaaaacactgaccagcgctctcaggattacagtgcgattaaggacgttttccgtccaggccatgccgattacacctacgaacaaaaatacggtctgcgcgattatcgcggcggtggacgttcttccgcccgcgaaaccgccatgcgcgtggcggcaggagctattgccaaaaaatatctcgccgagaaatttggtattgaaatccgtggctgcctgacccagatgggcgacattccgctggatatcaaagactggtcgcaggtcgagcaaaatccgtttttttgcccggaccccgacaaaatcgacgcgttagacgagttgatgcgtgcgctgaaaaaagagggcgactccatcggcgctaaagtcaccgttgttgccagtggcgttcctgccggacttggcgagccggtctttgaccgcctggatgctgacatcgcccatgcgctgatgagcatcaacgcggtgaaaggcgtggaaattggcgacggctttgacgtggtggcgctgcgcggcagccagaaccgcgatgaaatcaccaaagacggtttccagagcaaccatgcgggcggcattctcggcggtatcagcagcgggcagcaaatcattgcccatatggcgctgaaaccgacctccagcattaccgtgccgggtcgtaccattaaccgctttggcgaagaagttgagatgatcaccaaaggccgtcacgatccctgtgtcgggatccgcgcagtgccgatcgcagaagcgatgctggcgatcgttttaatggatcacctgttacggcaacgggcgcaaaatgccgatgtgaagactgatattccacgctggtaa

SEQ ID NO: 252 - DNA, 564 bp, Escherichia coli
atgatcctgcttatagataactacgattcttttacctggaacctctaccagtacttttgtgaactgggggcggatgtgctggttaagcgcaacgatgcgttgacgctggcggatatcgacgcccttaaaccacaaaaaattgtcatctcacctggcccctgtacgccagatgaagccgggatctcccttgacgttattcgccactatgccgggcgcttgccgattcttggcgtctgcctcggtcatcaggcaatggcgcaggcatttggcggtaaagttgtgcgcgccgcaaaggtcatgcacggcaaaacctcgccgattacacataacggtgagggcgtatttcgggggctggcaaatccacttaccgtgacacgctaccattcgctggtggtggaacctgactcattaccagcgtgctttgacgtgacggcctggagcgaaacccgagagattatggggattcgccatcgccagtgggatctggaaggtgtgcagttccatccagaaagtattcttagcgaacaaggacatcaactgctggctaatttcctgcatcgctga

SEQ ID NO: 253 - DNA, 1362 bp, Escherichia coli
atgaagacgttatctcccgctgtgattactttactctggcgtcaggacgccgctgaattttatttctcccgcttaagccacctgccgtgggcgatgcttttacactccggctatgccgatcatccgtatagccgctttgatattgtggtcgccgagccgatttgcactttaaccactttcggtaaagaaaccgttgttagtgaaagcgaaaaacgcacaacgaccactgatgacccgctacaggtgctccagcaggtgctggatcgcgcagacattcgcccaacgcataacgaagatttgccatttcagggcggcgcactggggttgtttggctacgatctgggccgccgttttgagtcactgccagaaattgcggaacaagatatcgttctgccggatatggcagtgggtatctacgattgggcgctcattgtcgaccaccagcgtcatacagtttctttgctgagtcataatgatgtcaatgcccgtcgggcctggctggaaagccagcaattctcgccgcaggaagatttcacgctcacttccgactggcaatccaatatgacccgcgagcagtacggcgaaaaatttcgccaggtacaggaatatctgcacagcggtgattgctatcaggtgaatctcgcccaacgttttcatgcgacctattctggcgatgaatggcaggcattccttcagcttaatcaggccaaccgcgcgccatttagcgcttttttacgtcttgaacagggtgcaattttaagcctttcgccagagcggtttattctttgtgataatagtgaaatccagacccgcccgattaaaggcacgctaccacgcctgcccgatcctcaggaagatagcaaacaagcagtaaaactggcgaactcagcgaaagatcgtgccgaaaatctgatgattgtcgatttaatgcgtaatgatatcggtcgtgttgccgtagcaggttcggtaaaagtaccagagctgttcgtggtggaacccttccctgccgtgcatcatctggtcagcaccataacggcgcaactaccagaacagttacacgccagcgatctgctgcgcgcagcttttcctggtggctcaataaccggggctccgaaagtacgggctatggaaattatcgacgaactggaaccgcagcgacgcaatgcctggtgcggcagcattggctatttgagcttttgcggcaacatggataccagtattactatccgcacgctgactgccattaacggacaaattttctgctctgcgggcggtggaattgtcgccgatagccaggaagaagcggaatatcaggaaacttttgataaagttaatcgtatcctgaagcaactggagaagtaa

SEQ ID NO: 254 - DNA, 1122 bp, Escherichia coli
atggttgctgaattgaccgcattacgcgatcaaattgatgaagtcgataaagcgctgctgaatttattagcgaagcgtctggaactggttgctgaagtgggcgaggtgaaaagccgctttggactgcctatttatgttccggagcgcgaggcatctatgttggcctcgcgtcgtgcagaggcggaagctctgggtgtaccgccagatctgattgaggatgttttgcgtcgggtgatgcgtgaatcttactccagtgaaaacgacaaaggatttaaaacactttgtccgtcactgcgtccggtggttatcgtcggcggtggcggtcagatgggacgcctgttcgagaagatgctgaccctctcgggttatcaggtgcggattctggagcaacatgactgggatcgagcggctgatattgttgccgatgccggaatggtgattgttagtgtgccaatccacgttactgagcaagttattggcaaattaccgcctttaccgaaagattgtattctggtcgatctggcatcagtgaaaaatgggccattacaggccatgctggtggcgcatgatggtccggtgctggggctacacccgatgttcggtccggacagcggtagcctggcaaagcaagttgtggtctggtgtgatggacgtaaaccggaagcataccaatggtttctggagcaaattcaggtctggggcgctcggctgcatcgtattagcgccgtcgagcacgatcagaatatggcgtttattcaggcactgcgccactttgctacttttgcttacgggctgcacctggcagaagaaaatgttcagcttgagcaacttctggcgctctcttcgccgatttaccgccttgagctggcgatggtcgggcgactgtttgctcaggatccgcagctttatgccgacatcattatgtcgtcagagcgtaatctggcgttaatcaaacgttactataagcgtttcggcgaggcgattgagttgctggagcagggcgataagcaggcgtttattgacagtttccgcaaggtggagcactggttcggcgattacgcacagcgttttcagagtgaaagccgcgtgttattgcgtcaggcgaatgacaatcgccagtaa

SEQ ID NO: 255 - DNA, 1161 bp, Escherichia coli
atgacatcggaaaacccgttactggcgctgcgagagaaaatcagcgcgctggatgaaaaattattagcgttactggcagaacggcgcgaactggccgtcgaggtgggaaaagccaaactgctctcgcatcgcccggtacgtgatattgatcgtgaacgcgatttgctggaaagattaattacgctcggtaaagcgcaccatctggacgcccattacattactcgcctgttccagctcatcattgaagattccgtattaactcagcaggctttgctccaacaacatctcaataaaattaatccgcactcagcacgcatcgcttttctcggccccaaaggttcttattcccatcttgcggcgcgccagtatgctgcccgtcactttgagcaattcattgaaagtggctgcgccaaatttgccgatatttttaatcaggtggaaaccggccaggccgactatgccgtcgtaccgattgaaaataccagctccggtgccataaacgacgtttacgatctgctgcaacataccagcttgtcgattgttggcgagatgacgttaactatcgaccattgtttgttggtctccggcactactgatttatccaccatcaatacggtctacagccatccgcagccattccagcaatgcagcaaattccttaatcgttatccgcactggaagattgaatataccgaaagtacgtctgcggcaatggaaaaggttgcacaggcaaaatcaccgcatgttgctgcgttgggaagcgaagctggcggcactttgtacggtttgcaggtactggagcgtattgaagcaaatcagcgacaaaacttcacccgatttgtggtgttggcgcgtaaagccattaacgtgtctgatcaggttccggcgaaaaccacgttgttaatggcgaccgggcaacaagccggtgcgctggttgaagcgttgctggtactgcgcaaccacaatctgattatgacccgtctggaatcacgcccgattcacggtaatccatgggaagagatgttctatctggatattcaggccaatcttgaatcagcggaaatgcaaaaagcattgaaagagttaggggaaatcacccgttcaatgaaggtattgggctgttacccaagtgagaacgtagtgcctgttgatccaacctga

SEQ ID NO: 256 - DNA, 1194 bp, Escherichia coli
gtgtttcaaaaagttgacgcctacgctggcgacccgattcttacgcttatggagcgttttaaagaagaccctcgcagcgacaaagtgaatttaagtatcggtctgtactacaacgaagacggaattattccacaactgcaagccgtggcggaggcggaagcgcgcctgaatgcgcagcctcatggcgcttcgctttatttaccgatggaagggcttaactgctatcgccatgccattgcgccgctgctgtttggtgcggaccatccggtactgaaacaacagcgcgtagcaaccattcaaacccttggcggctccggggcattgaaagtgggcgcggatttcctgaaacgctacttcccggaatcaggcgtctgggtcagcgatcctacctgggaaaaccacgtagcaatattcgccggggctggattcgaagtgagtacttacccctggtatgacgaagcgactaacggcgtgcgctttaatgacctgttggcgacgctgaaaacattacctgcccgcagtattgtgttgctgcatccatgttgccacaacccaacgggtgccgatctcactaatgatcagtgggatgcggtgattgaaattctcaaagcccgcgagcttattccattcctcgatattgcctatcaaggatttggtgccggtatggaagaggatgcctacgctattcgcgccattgccagcgctggattacccgctctggtgagcaattcgttctcgaaaattttctccctttacggcgagcgcgtcggcggactttctgttatgtgtgaagatgccgaagccgctggccgcgtactggggcaattgaaagcaacagttcgccgcaactactccagcccgccgaattttggtgcgcaggtggtggctgcagtgctgaatgacgaggcattgaaagccagctggctggcggaagtagaagagatgcgtactcgcattctggcaatgcgtcaggaattggtgaaggtattaagcacagagatgccagaacgcaatttcgattatctgcttaatcagcgcggcatgttcagttataccggtttaagtgccgctcaggttgaccgactacgtgaagaatttggtgtctatctcatcgccagcggtcgcatgtgtgtcgccgggttaaatacggcaaatgtacaacgtgtggcaaaggcgtttgctgcggtgatgtaa

SEQ ID NO: 257 - DNA, 1191 bp, Escherichia coli; identical to SEQ ID NO: 239

SEQ ID NO: 258 - DNA, 873 bp, Escherichia coli
atggagtggagtctgacgcagaataagctgctggcgtttcatcgcttaatgcgtacggataagccaattggcgcgttactgctgctctggccaacattatgggcgttgtgggtggcgacaccgggcgttccccagctctggatcctggcggtgtttgtcgcgggtgtctggctgatgcgcgctgccggatgtgtggtgaatgattatgctgaccgcaagtttgatggtcatgttaagcgcacggcgaaccgaccacttcccagcggcgcggtaacagagaaagaggcgcgcgcgctgtttgtcgtgctggtactgatttcgtttttactggtgctgacgctgaatacgatgaccattctgttgtcgattgccgcgctagcgctggcgtgggtgtacccgtttatgaagcggtatacccatctaccgcaagtggtgctgggcgcggcgtttggctggtcgattccaatggcttttgccgctgtgagtgagtcggtgccattgagttgctggttaatgttcctcgccaatattctctgggcggtggcttacgacacgcagtatgcgatggttgaccgcgatgatgatgtgaagattggcattaaatccacggcaatcctgttcggccaatacgataaattgattattggtattttgcagattggcgtactggcactgatggcgatcatcggtgagttaaatggcttaggctggggatattactggtcaattctggtggctggcgcgctgtttgtttatcaacaaaaactgattgccaaccgcgagcgtgaagcctgctttaaagcatttatgaataataactatgttggtctggtactatttttagggctggcaatgagttactggcatttctga

SEQ ID NO: 259 - DNA, 498 bp, Escherichia coli
atgtcacaccccgcgttaacgcaactgcgtgcgctgcgctattgtaaagagatccctgccctggatccgcaactgctcgactggctgttgctggaggattccatgacaaaacgttttgaacagcagggaaaaacggtaagcgtgacgatgatccgcgaagggtttgtcgagcagaatgaaatccccgaagaactgccgctgctgccgaaagagtctcgttactggttacgtgaaattttgttatgtgccgatggtgaaccgtggcttgccggtcgtaccgtcgttcctgtgtcaacgttaagcgggccggagctggcgttacaaaaattgggtaaaacgccgttaggacgctatctgttcacatcatcgacattaacccgggactttattgagataggccgtgatgccgggctgtgggggcgacgttcccgcctgcgattaagcggtaaaccgctgttgctaacagaactgtttttaccggcgtcaccgttgtactaa

SEQ ID NO: 260 - DNA, 570 bp, Escherichia coli
atgaaacgactcattgtaggcatcagcggtgccagcggcgcgatttatggcgtgcgcttattacaggttctgcgcgatgtcacagatatcgaaacgcatctggtgatgagccaggcagcgcgccagaccttatccctcgaaacggatttttctctgcgcgaagtgcaggcattagccgatgtcacgcacgatgcgcgcgatattgccgccagcatctcttccggttctttccagacgctggggatggtgattttaccctgttcaatcaaaaccctttccggcattgtccatagctatactgatggcttactgacccgtgcggcagatgtggtgctgaaagagcgtcgcccgttggtgctctgcgtgcgtgaaacaccattgcacttaggccatctgcgtttaatgactcaggcggcagaaatcggtgcggtgattatgcctcccgttccggcgttttatcatcgcccgcaatcccttgatgatgtgataaatcagacggttaatcgtgttcttgaccagtttgcgataacccttcctgaagatctctttgcccgctggcagggcgcataa

SEQ ID NO: 261 - DNA, 1494 bp, Escherichia coli
atggacgccatgaaatataacgatttacgcgacttcttgacgctgcttgaacagcagggtgagctaaaacgtatcacgctcccggtggatccgcatctggaaatcactgaaattgctgaccgcactttgcgtgccggtgggcctgcgctgttgttcgaaaaccctaaaggctactcaatgccggtgctgtgcaacctgttcggtacgccaaagcgcgtggcgatgggcatggggcaggaagatgtttcggcgctgcgtgaagttggtaaattattggcgtttctgaaagagccggagccgccaaaaggtttccgcgacctgtttgataaactgccgcagtttaagcaagtattgaacatgccgacaaagcggctgcgtggtgcgccctgccaacaaaaaatcgtctctggcgatgacgtcgatctcaatcgcattcccattatgacctgctggccggaagatgccgcgccgctgattacctgggggctgacagtgacgcgcggcccacataaagagcggcagaatctgggcatttatcgccagcagctgattggtaaaaacaaactgattatgcgctggctgtcgcatcgcggcggcgcgctggattatcaggagtggtgtgcggcgcatccgggcgaacgtttcccggtttctgtggcgctgggtgccgatcccgccacgattctcggtgcagtcactcccgttccggatacgctttcagagtatgcgtttgccggattgctacgtggcaccaagaccgaagtggtgaagtgtatctccaatgatcttgaagtgcccgccagtgcggagattgtgctggaagggtatatcgaacaaggcgaaactgcgccggaagggccgtatggcgaccacaccggttactataatgaagtcgatagtttcccggtatttaccgtgacgcatattacccagcgtgaagatgcgatttaccattccacctataccgggcgtccgccagatgagcccgcggtgctgggtgtcgcactgaacgaagtgtttgtgccgattctgcaaaaacagttcccggaaattgtcgatttttacctgccgccggaaggctgctcttatcgcctggcggtagtgacaatcaaaaaacagtacgccggacacgcgaagcgcgtcatgatgggcgtctggtcgttcttacgccagtttatgtacactaaatttgtgatcgtttgcgatgatgacgttaacgcacgcgactggaacgatgtgatttgggcgattaccacccgtatggacccggcgcgggatactgttctggtagaaaatacgcctattgattatctggattttgcctcgcctgtctccgggctgggttcaaaaatggggctggatgccacgaataaatggccgggggaaacccagcgtgaatggggacgtcccatcaaaaaagatccagatgttgtcgcgcatattgacgccatctgggatgaactggctatttttaacaacggtaaaagcgcctga

SEQ ID NO: 262 - DNA, 1641 bp, Escherichia coli
atgacgccaggtgaagtacggcgcctatatttcatcattcgcacttttttaagctacggacttgatgaactgatccccaaaatgcgtatcaccctgccgctacggctatggcgatactcattattctggatgccaaatcggcataaagacaaacttttaggtgagcgactacgactggccctgcaagaactggggccggtttggatcaagttcgggcaaatgttatcaacccgccgcgatctttttccaccgcatattgccgatcagctggcgttattgcaggacaaagttgctccgtttgatggcaagctggcgaagcagcagattgaagctgcaatgggcggcttgccggtagaagcgtggtttgacgattttgaaatcaagccgctggcttctgcttctatcgcccaggttcataccgcgcgattgaaatcgaatggtaaagaggtggtgattaaagtcatccgcccggatattttgccggttattaaagcggatctgaaacttatctaccgtctggctcgctgggtgccgcgtttgctgccggatggtcgccgtctgcgcccaaccgaagtggtgcgcgagtacgaaaagacattgattgatgaactgaatttgctgcgggaatctgccaacgccattcagcttcggcgcaattttgaagacagcccgatgctctacatcccggaagtttaccctgactattgtagtgaagggatgatggtgatggagcgcatttacggcattccggtgtctgatgttgcggcgctggagaaaaacggcactaacatgaaattgctggcggaacgcggcgtgcaggtgttcttcactcaggtctttcgcgacagctttttccatgccgatatgcaccctggcaacatcttcgtaagctatgaacacccggaaaacccgaaatatatcggcattgattgcgggattgttggctcgctaaacaaagaagataaacgctatctggcagaaaactttatcgccttctttaatcgcgactatcgcaaagtggcagagctacacgtcgattctggctgggtgccaccagataccaacgttgaagagttcgaatttgccattcgtacggtctgtgaacctatctttgagaaaccgctggccgaaatttcgtttggacatgtactgttaaatctgtttaatacggcgcgtcgcttcaatatggaagtgcagccgcaactggtgttactccagaaaaccctgctctacgtcgaaggggtaggacgccagctttatccgcaactcgatttatggaaaacggcgaagcctttcctggagtcgtggattaaagatcaggtcggtattcctgcgctggtgagagcatttaaagaaaaagcgccgttctgggtcgaaaaaatgccagaactgcctgaattggtttacgacagtttgcgccagggcaagtatttacagcacagtgttgataagattgcccgcgagcttcagtcaaatcatgtacgtcagggacaatcgcgttattttctcggaattggcgctacgttagtattaagtggcacattcttgttggtcagccgacctgaatgggggctgatgcccggctggttaatggcaggtggtctgatcgcctggtttgtcggttggcgcaaaacacgctga

SEQ ID NO: 263 - DNA, 723 bp, Escherichia coli
atgaatgccgaaaaatcgccggtaaaccataacgtagaccacgaagagatcgctaaatttgaagccgtcgcctcccgctggtgggatctggaaggtgagttcaaaccgctgcaccgcattaacccgctgcgtctgggctatattgccgagcgtgctggcggtttatttggcaaaaaggtgctcgatgtcggttgtggcggcggcattctggccgagagtatggcgcgcgaaggcgcgacggtgaccggtctggatatgggctttgagccattgcaggtggcaaaactgcacgcactggaaagcggcattcaggtggattacgtgcaggaaaccgtggaagagcacgcggcaaaacatgccgggcagtatgatgtggtgacctgcatggagatgctggagcacgtccccgatccgcagtcagtggtcagagcctgtgcgcaactggtgaaaccaggcggcgatgtctttttctcgacacttaaccgcaacggcaagtcatggctgatggcggtggttggtgcggaatatattttgcgcatggtgcccaaaggcacgcatgatgtgaagaagtttattaaaccggcagaattgctgggctgggtggatcagaccagtttaaaagagcggcatatcactgggctgcattacaacccgatcactaatacttttaaactcggccccggcgtggatgtgaactatatgctgcacacgcagaataagtga

SEQ ID NO: 264 - DNA, 1179 bp, Escherichia coli
atgagcgtaatcatcgtcggtggcggcatggcgggcgcgacgctggcgctggctatttcccggttaagtcacggggcgctgccggtacatttgattgaagcgactgcgccagagtcacatgctcatccgggctttgatggacgagcgatagcgctggcggcgggtacctgtcagcaactggcgcgcatcggcgtctggcaatctctggcggattgcgcaactgccatcaccaccgtgcatgtcagcgatcgtggtcacgctggatttgtcaccctcgccgcagaagattaccaactggcggcgctgggacaggttgtcgaattgcacaatgtcgggcaacggctgtttgcattgctgcgtaaagcacctggcgtaacgctgcattgccctgatcgcgtggctaacgttgcccgtactcagagtcacgttgaagtgacgctggagagtggcgagacgctgacgggccgcgtgctggtagcagctgatggcacccattcagcgttagccaccgcgtgcggcgttgactggcagcaggagccttacgaacaactggccgtgattgccaacgttgctacttccgttgcgcatgaagggcgcgcttttgaacgctttacgcaacatggcccgctggcgatgttgccgatgtctgacggacgctgttcgctggtctggtgtcatccactggaacggcgcgaagaggtgttgtcgtggagtgacgagaagttttgccgtgaactccagtcggcctttggctggcgacttgggaaaattacccacgctggtaaacgcagtgcttatccgctggcgttaacccacgccgccagatctattacccatcgtaccgtgctggtgggcaatgcggcgcaaactctgcacccgattgccgggcaagggtttaacctcggtatgcgagatgtgatgagtcttgcggaaaccctgactcaggcgcaggagcgcggagaagacatgggggattacggcgtattgtgccgttatcagcagcgtcgacagagcgatcgcgaagcaaccattggcgtcacggacagccttgtacatctttttgccaaccgttgggcaccgctggttgtcgggcgcaacatcgggctgatgacgatggaattattcaccccggcacgcgatgtgctggcgcagcgcaccctcggttgggtggcgcgttga

SEQ ID NO: 265 - DNA, 756 bp, Escherichia coli
atggtggataagtcacaagaaacgacgcactttggttttcagaccgtcgcgaaggaacaaaaagcggatatggtcgcccacgttttccattccgtggcatcaaaatacgatgtcatgaatgatttgatgtcatttggtattcatcgtttgtggaagcgattcacgattgattgcagcggcgtacgccgtgggcagaccgtgctggatctggctggtggcaccggcgacctgacagcgaaattctcccgcctggtcggagaaactggcaaagtggtccttgctgatatcaatgaatccatgctcaaaatgggccgcgagaagctgcgtaatatcggtgtgattggcaacgttgagtatgttcaggcgaacgctgaggcgctgccgttcccggataacacctttgattgcatcaccatttcgtttggtctgcgtaacgtcaccgacaaagataaagcactgcgttcaatgtatcgcgtgctgaaacccggcggccgcctgctggtgcttgagttctcgaagccaattatcgagccgctgagcaaagcctatgatgcatactccttccatgtgctgccgcgtattggctcactggtcgcgaacgacgccgacagctaccgttatctggcagaatccatccgtatgcatcccgatcaggataccctgaaagccatgatgcaggatgccggattcgaaagtgtcgactactacaatctgacggcaggggttgtggcgctgcatcgtggttataagttctga

SEQ ID NO: 266 - DNA, 1176 bp, Escherichia coli
atgacaaatcaaccaacggaaattgccattgtcggcggaggaatggtcggcggcgcactggcgctggggctggcacagcacggatttgcggtaacggtgatcgagcacgcagaaccagcgccgtttgtcgctgatagccaaccggacgtgcggatctcggcgatcagcgcggcttcggtatcattgcttaaagggttaggggtctgggatgcagtacaggctatgcgttgccatccttaccgcagactggaaacgtgggagtgggaaacggcgcatgtggtgtttgacgccgctgaacttaagctaccgctgcttggctatatggtggaaaacactgtcctgcaacaggcgttgtggcaggcgctggaagcgcatccgaaagtaacgttacgtgtgccaggctcgctgattgcgctgcatcgccatgatgatcttcaggagctggagctgaaaggcggtgaagtgattcgcgcgaagctggtgattggtgccgacggcgcaaattcgcaggtgcggcagatggcgggaattggcgttcatgcatggcagtatgcgcagtcgtgcatgttgattagcgtccagtgcgagaacgatcccggcgacagcacctggcagcaatttactccggacggaccgcgtgcgtttctgccgttgtttgataactgggcatcgctggtgtggtatgactctccggcgcgtattcgccagttgcagaatatgaatatggcacagctccaggcggaaatcgcgaagcatttcccgtcgcgtctgggttacgttacaccgcttgccgctggtgcgtttccgctgacgcgtcgccatgcgttgcagtacgtgcagccagggcttgcgctggtgggcgatgccgcgcataccatccatccgctggcggggcagggagtgaatcttggttatcgtgatgtcgatgccctgattgatgttctggtcaacgcccgcagctacggcgaagcgtgggccagttatcctgtcctcaagcgttaccagatgcggcgcatggcggataacttcattatgcaaagcggtatggatctgttttatgccggattcagcaataatctgccaccactgcgttttatgcgtaatctcgggttaatggcggcggagcgtgctggcgtgttgaaacgtcaggcgctgaaatatgcgttagggttgtag

SEQ ID NO: 267 - DNA, 1596 bp, Escherichia coli
atggctgacattctgctgctcgataatatcgactcttttacgtacaacctggcagatcagttgcgcagcaatgggcataacgtggtgatttaccgcaaccatattccggcgcaaaccttaattgaacgcctggcgaccatgagcaatccggtgctgatgctttctcctggccccggtgtgccgagcgaagccggttgtatgccggaactcctcacccgcttgcgtggcaagctgcccattattggcatttgcctcggacatcaggcgattgtcgaagcttacgggggctatgtcggtcaggcgggcgaaattctccacggtaaagcctccagcattgaacatgacggtcaggcgatgtttgccggattaacaaacccgctgccggtggcgcgttatcactcgctggttggcagtaacattccggccggtttaaccatcaacgcccattttaatggcatggtgatggcagtacgtcacgatgcggatcgcgtttgtggattccagttccatccggaatccattctcaccacccagggcgctcgcctgctggaacaaacgctggcctgggcgcagcagaaactagagccagccaacacgctgcaaccgattctggaaaaactgtatcaggcgcagacgcttagccaacaagaaagccaccagctgttttcagcggtggtgcgtggcgagctgaagccggaacaactggcggcggcgctggtgagcatgaaaattcgcggtgagcacccgaacgagatcgccggggcagcaaccgcgctactggaaaacgcagcgccgttcccgcgcccggattatctgtttgctgatatcgtcggtactggcggtgacggcagcaacagtatcaatatttctaccgccagtgcgtttgtcgccgcggcctgtgggctgaaagtggcgaaacacggcaaccgtagcgtctccagtaaatctggttcgtccgatctgctggcggcgttcggtattaatcttgatatgaacgccgataaatcgcgccaggcgctggatgagttaggtgtatgtttcctctttgcgccgaagtatcacaccggattccgccacgcgatgccggttcgccagcaactgaaaacccgcaccctgttcaatgtgctggggccattgattaacccggcgcatccgccgctggcgttaattggtgtttatagtccggaactggtgctgccgattgccgaaaccttgcgcgtgctggggtatcaacgcgcggcggtggtgcacagcggcgggatggatgaagtttcattacacgcgccgacaatcgttgccgaactgcatgacggcgaaattaaaagctatcagctcaccgcagaagactttggcctgacaccctaccaccaggagcaactggcaggcggaacaccggaagaaaaccgtgacattttaacacgtttgttacaaggtaaaggcgacgccgcccatgaagcagccgtcgctgcgaacgtcgccatgttaatgcgcctgcatggccatgaagatctgcaagccaatgcgcaaaccgttcttgaggtactgcgcagtggttccgcttacgacagagtcaccgcactggcggcacgagggtaa

SEQ ID NO: 268 - DNA, 1563 bp, Escherichia coli
atgcaaacacaaaaaccgactctcgaactgctaacctgcgaaggcgcttatcgcgacaatcccaccgcgctttttcaccagttgtgtggggatcgtccggcaacgctgctgctggaatccgcagatatcgacagcaaagatgatttaaaaagcctgctgctggtagacagtgcgctgcgcattacagctttaggtgacactgtcacaatccaggcactttccggcaacggcgaagccctcctggcactactggataacgccctgcctgcgggtgtggaaagtgaacaatcaccaaactgccgtgtgctgcgcttcccccctgtcagtccactgctggatgaagacgcccgcttatgctccctttcggtttttgacgctttccgtttattgcagaatctgttgaatgtaccgaaggaagaacgagaagccatgttcttcggcggcctgttctcttatgaccttgtggcgggatttgaagatttaccgcaactgtcagcggaaaataactgccctgatttctgtttttatctcgctgaaacgctgatggtgattgaccatcagaaaaaaagcacccgtattcaggccagcctgtttgctccgaatgaagaagaaaaacaacgtctcactgctcgcctgaacgaactacgtcagcaactgaccgaagccgcgccgccgctgccagtggtttccgtgccgcatatgcgttgtgaatgtaatcagagcgatgaagagttcggtggcgtagtgcgtttgttgcaaaaagcgattcgcgctggagaaattttccaggtggtgccatctcgccgtttctctctgccctgcccgtcaccgctggcggcctattacgtgctgaaaaagagtaatcccagcccgtacatgttttttatgcaggataatgatttcaccctatttggcgcgtcgccggaaagctcgctcaagtatgatgccaccagccgccagattgagatctacccgattgccggaacacgcccacgcggtcgtcgcgccgatggttcactggacagagatctcgacagccgtattgaactggaaatgcgtaccgatcataaagagctgtctgaacatctgatgctggttgatctcgcccgtaatgatctggcacgcatttgcacccccggcagccgctacgtcgccgatctcaccaaagttgaccgttattcctatgtgatgcacctcgtctctcgcgtagtcggcgaactgcgtcacgatcttgacgccctgcacgcttatcgcgcctgtatgaatatggggacgttaagcggtgcgccgaaagtacgcgctatgcagttaattgccgaggcggaaggtcgtcgccgcggcagctacggcggcgcggtaggttatttcaccgcgcatggcgatctcgacacctgcattgtgatccgctcggcgctggtggaaaacggtatcgccaccgtgcaagcgggtgctggtgtagtccttgattctgttccgcagtcggaagccgacgaaacccgtaacaaagcccgcgctgtactgcgcgctattgccaccgcgcatcatgcacaggagactttctga

SEQ ID NO: 269 - DNA, 1359 bp, Escherichia coli
atgcaaaccgttttagcgaaaatcgtcgcagacaaggcgatttgggtagaagcccgcaaacagcagcaaccgctggccagttttcagaatgaggttcagccgagcacgcgacatttttatgatgcgctacagggtgcgcgcacggcgtttattctggagtgcaagaaagcgtcgccgtcaaaaggcgtgatccgtgatgatttcgatccagcacgcattgccgccatttataaacattacgcttcggcaatttcggtgctgactgatgagaaatattttcaggggagctttaatttcctccccatcgtcagccaaatcgccccgcagccgattttatgtaaagacttcattatcgacccttaccagatctatctggcgcgctattaccaggccgatgcctgcttattaatgctttcagtactggatgacgaccaatatcgccagcttgccgccgtcgctcacagtctggagatgggggtgctgaccgaagtcagtaatgaagaggaacaggagcgcgccattgcattgggagcaaaggtcgttggcatcaacaaccgcgatctgcgtgatttgtcgattgatctcaaccgtacccgcgagcttgcgccgaaactggggcacaacgtgacggtaatcagcgaatccggcatcaatacttacgctcaggtgcgcgagttaagccacttcgctaacggttttctgattggttcggcgttgatggcccatgacgatttgcacgccgccgtgcgccgggtgttgctgggtgagaataaagtatgtggcctgacgcgtgggcaagatgctaaagcagcttatgacgcgggcgcgatttacggtgggttgatttttgttgcgacatcaccgcgttgcgtcaacgttgaacaggcgcaggaagtgatggctgcggcaccgttgcagtatgttggcgtgttccgcaatcacgatattgccgatgtggtggacaaagctaaggtgttatcgctggcggcagtgcaactgcatggtaatgaagaacagctgtatatcgatacgctgcgtgaagctctgccagcacatgttgccatctggaaagcattaagcgtcggtgaaaccctgcccgcccgcgagtttcagcacgttgataaatatgttttagacaacggccagggtggaagcgggcaacgttttgactggtcactattaaatggtcaatcgcttggcaacgttctgctggcggggggcttaggcgcagataactgcgtggaagcggcacaaaccggctgcgccggacttgattttaattctgctgtagagtcgcaaccgggcatcaaagacgcacgtcttttggcctcggttttccagacgctgcgcgcatattaa

SEQ ID NO: 270 - DNA, 807 bp, Escherichia coli
atggaacgctacgaatctctgtttgcccagttgaaggagcgcaaagaaggcgcattcgttcctttcgtcacgctcggtgatccgggcattgagcagtcattgaaaattatcgatacgctaattgaagccggtgctgacgcgctggagttaggtatccccttctccgacccactggcggatggcccgacgattcaaaacgccactctgcgcgcctttgcggcaggtgtgactccggcacaatgttttgaaatgctggcactgattcgccagaaacacccgaccattcccattggcctgttgatgtatgccaatctggtgtttaacaaaggcattgatgagttttatgcccagtgcgaaaaagtcggcgtcgattcggtgctggttgccgatgtgccagttgaagagtccgcgcccttccgccaggccgcgttgcgtcataatgtcgcacctatcttcatctgcccgccaaatgccgatgacgacctgctgcgccagatagcctcttacggtcgtggttacacctatttgctgtcacgagcaggcgtgaccggcgcagaaaaccgcgccgcgttacccctcaatcatctggttgcgaagctgaaagagtacaacgctgcacctccattgcagggatttggtatttccgccccggatcaggtaaaagcagcgattgatgcaggagctgcgggcgcgatttctggttcggccattgttaaaatcatcgagcaacatattaatgagccagagaaaatgctggcggcactgaaagtttttgtacaaccgatgaaagcggcgacgcgcagttaa

SEQ ID NO: 271 - DNA, 1194 bp, Escherichia coli
atgacaacattacttaacccctattttggtgagtttggcggcatgtacgtgccacaaatcctgatgcctgctctgcgccagctggaagaagcttttgtcagtgcgcaaaaagatcctgaatttcaggctcagttcaacgacctgctgaaaaactatgccgggcgtccaaccgcgctgaccaaatgccagaacattacagccgggacgaacaccacgctgtatctcaagcgtgaagatttgctgcacggcggcgcgcataaaactaaccaggtgctggggcaggcgttgctggcgaagcggatgggtaaaaccgaaatcatcgccgaaaccggtgccggtcagcatggcgtggcgtcggcccttgccagcgccctgctcggcctgaaatgccgtatttatatgggtgccaaagacgttgaacgccagtcgcctaacgtttttcgtatgcgcttaatgggtgcggaagtgatcccggtgcatagcggttccgcgacgctgaaagatgcctgtaacgaggcgctgcgcgactggtccggtagttacgaaaccgcgcactatatgctgggcaccgcagctggcccgcatccttatccgaccattgtgcgtgagtttcagcggatgattggcgaagaaaccaaagcgcagattctggaaagagaaggtcgcctgccggatgccgttatcgcctgtgttggcggcggttcgaatgccatcggcatgtttgctgatttcatcaatgaaaccaacgtcggcctgattggtgtggagccaggtggtcacggtatcgaaactggcgagcacggcgcaccgctaaaacatggtcgcgtgggtatctatttcggtatgaaagcgccgatgatgcaaaccgaagacgggcagattgaagaatcttactccatctccgccggactggatttcccgtctgtcggcccacaacacgcgtatcttaacagcactggacgcgctgattacgtgtctattaccgatgatgaagcccttgaagccttcaaaacgctgtgcctgcacgaagggatcatcccggcgctggaatcctcccacgccctggcccatgcgttgaaaatgatgcgcgaaaacccggataaagagcagctactggtggttaacctttccggtcgcggcgataaagacatcttcaccgttcacgatattttgaaagcacgaggggaaatctga

SEQ ID NO: 272 - DNA, 1296 bp, Escherichia coli
gtgcaatcacttactacggcgctggaaaatctactgcgccatttgtcgcaagagattccggcgacacccggcattcgggttatcgatattcctttccctctcaaagacgcttttgatgccttgagctggctggccagtcagcaaacatacccgcaattctactggcaacaacgtaatggtgatgaagaagctgtcgtcctgggcgcgattacccgttttacgtcgttggaccaggcacaacgttttcttcgccagcacccggaacacgccgacttacgcatttgggggctgaatgcttttgacccgtcgcagggcaatttacttttaccccgcctggaatggcgacgctgtggcggtaaagccacgctgcggctgacgctattcagcgaaagctcccttcagcacgatgcgattcaggcaaaagaatttatcgccacactggtgagtatcaagcccttgcctgggttacatttaaccaccacgcgagaacaacactggccggacaaaacgggctggacgcaattaatcgaactggcaacgaaaaccatcgccgaaggtgagctcgacaaagtggtgctcgctcgggcaactgacctgcatttcgcaagtccggtcaacgcggcggcgatgatggctgccagtcgtcgactgaatctgaattgctaccatttttacatggcctttgatggcgaaaatgcttttcttggctcttcaccggaacggttatggcggcggcgtgacaaagcgctgcgtactgaagcgctggcgggaacagtagcaaataatcctgatgataagcaggcgcagcagttaggagagtggctgatggcggatgataaaaaccagcgcgagaacatgctggtggtggaagatatctgtcaacgattacaggccgatacccagacgctggatgttttaccgccgcaggtactgcgtctgcgtaaagtgcagcatcttcgccgctgtatctggacttcactcaacaaagcggatgatgtgatctgtttacatcagttgcagccaacggcagcagttgctggcttaccgcgcgatctggcgcgacagtttatcgcccgtcacgaaccgttcacccgagaatggtacgccggttctgcgggctatctctcattacaacaaagcgaattctgcgtttccctgcgctcagcaaaaattagcggcaatgtcgtgcgattatatgctggcgcgggcattgtccgtggttccgaccccgagcaagagtggcaggaaatcgacaacaaagcggcagggctgcgtactttattacaaatggaatag

SEQ ID NO: 273 - DNA, 1176 bp, Escherichia coli
atggatacgtcactggctgaggaagtacagcagaccatggcaacacttgcgcccaatcgctttttctttatgtcgccgtaccgcagttttacgacgtcaggatgtttcgcccgcttcgatgaaccggctgtgaacggggattcgcccgacagtcccttccagcaaaaactcgccgcgctgtttgccgatgccaaagcgcagggcatcaaaaatccggtgatggtcggggcgattcccttcgatccacgtcagccttcgtcgctgtatattcctgaatcctggcagtcgttctcccgtcaggaaaaacaagcttccgcacgccgtttcacccgcagccagtcgctgaatgtggtggaacgccaggcaattccggagcaaaccacgtttgaacagatggttgcccgcgccgccgcacttaccgccacgccgcaggtcgacaaagtggtgttgtcacggttgattgatatcaccactgacgccgccattgatagtggcgtattgctggaacggttgattgcgcaaaacccggttagttacaacttccatgttccgctggctgatggtggcgtcctgctgggggccagcccggaactgctgctacgtaaagacggcgagcgttttagctccattccgttagccggttccgcgcgtcgtcagccggatgaagtgctcgatcgcgaagcaggtaatcgtctgctggcgtcagaaaaagatcgccatgaacatgaactggtgactcaggcgatgaaagaggtactgcgcgaacgcagtagtgagttacacgttccttcttctccacagctgatcaccacgccgacgctgtggcatctcgcaactccctttgaaggtaaagcgaattcgcaagaaaacgcactgactctggcctgtctgctgcatccgacccccgcgctgagcggtttcccgcatcaggccgcgacccaggttattgctgaactggaaccgttcgaccgcgaactgtttggcggcattgtgggttggtgtgacagcgaaggtaacggcgaatgggtggtgaccatccgctgcgcgaagctgcgggaaaatcaggtgcgtctgtttgccggagcggggattgtgcctgcgtcgtcaccgttgggtgagtggcgcgaaacaggcgtcaaactttctaccatgttgaacgtttttggattgcattaa

SEQ ID NO: 274 - DNA, 1611 bp, Escherichia coli
atgagcattccattcacccgctggccggaagagtttgcccgtcgctatcgggaaaaaggctactggcaggatttgccgctgaccgacattctgacgcgacatgctgcgagtgacagcatcgcggttatcgacggcgagcgacagttgagttatcgggagctgaatcaggcggcggataacctcgcgtgtagtttacgccgtcagggcattaaacctggtgaaaccgcgctggtacaactgggtaacgtcgctgaattgtatattacctttttcgcgctgctgaaactgggcgttgcgccggtgctggcgttgttcagccatcagcgtagtgaactgaacgcctatgccagccagattgaacccgcattgctgattgccgatcgccaacatgcgctgtttagcggggatgatttcctcaatactttcgtcacagaacattcctccattcgcgtggtgcaactgctcaacgacagcggtgagcataacttgcaggatgcgattaaccatccggctgaggattttactgccacgccatcacctgctgatgaagtggcctatttccagctttccggtggcaccaccggcacaccgaaactgatcccgcgcactcataacgactactactacagcgtgcgtcgtagcgtcgagatttgtcagttcacacaacagacacgctacctgtgcgcgatcccggcggctcataactacgccatgagttcgccaggatcgctgggcgtctttcttgccggaggaacggttgttctggcggccgatcccagcgccacgctctgtttcccattgattgaaaaacatcaggttaacgttaccgcgctggtgccacccgcagtcagcctgtggttgcaggcgctgatcgaaggcgaaagccgggcgcagcttgcctcgctgaaactgttacaggtcggcggcgcacgtctttctgccacccttgcggcgcgtattcccgctgagattggctgtcagttgcagcaggtgtttggcatggcggaagggctggtgaactacacccgacttgatgatagcgcggagaaaattatccatacccagggttacccaatgtgtccggatgacgaagtatgggttgccgatgccgaaggaaatccactgccgcaaggggaagtcggacgcctgatgacgcgcgggccgtacaccttccgcggctattacaaaagtccacagcacaatgccagcgcctttgatgccaacggtttttactgttccggcgatctgatctctattgatccagagggttacatcaccgtgcaggggcgcgagaaagatcagattaaccgtggcggcgagaagatcgctgccgaagagatcgaaaacctgctgctgcgccacccggcggtgatctacgccgcactggtgagcatggaagatgagctgatgggcgaaaaaagctgcgcttatctggtggtaaaagagccgctgcgcgcggtgcaggtgcgtcgtttcctgcgtgaacagggtattgccgaatttaaattaccggatcgcgtggagtgtgtggattcacttccgctgacggcggtcgggaaagtcgataaaaaacaattacgtcagtggctggcgtcacgcgcatcagcctga

SEQ ID NO: 275 - DNA, 3882 bp, Escherichia coli
atgagccagcatttacctttggtcgccgcacagcccggcatctggatggcagaaaaactgtcagaattaccctccgcctggagcgtggcgcattacgttgagttaaccggagaggttgattcgccattactggcccgcgcggtggttgccggactagcgcaagcagatacgctgcggatgcgttttacggaagataacggcgaagtctggcagtgggtcgatgatgcgctgacgttcgaactgccagaaattatcgacctacgaaccaacattgatccgcacggtactgcgcaggcattaatgcaggcggatttgcaacaagatctgcgcgtcgatagcggtaaaccactggtctttcatcagctgatacaggtggcggataaccgctggtactggtatcagcgttatcaccatttgctggtcgatggctttagtttcccggccattacccgccagatcgccaatatttactgcacatggctgcgtggcgaaccaacgcctgcttcgccatttacgcctttcgctgatgtagtggaagagtaccagcaataccgcgaaagcgaagcctggcagcgtgatgcggcattctgggcagaacagcgtcgtcaactgccgccgcccgcgtcactttctccggcacctttaccggggcgcagcgcctcggcagatattctgcgcctgaaactggaatttaccgacggggaattccgccagctggctacgcaactttcaggtgtgcagcgtaccgatttagcccttgcgctggcagccttgtggctggggcgattgtgcaatcgtatggactacgccgccggatttatctttatgcgtcgactgggctcggcggcgctgacggctaccggacccgtgctcaacgttttgccgttgggtattcacattgcggcgcaagaaacgctgccggaactggcaacccgactggcagcacaactgaaaaaaatgcgtcgtcatcaacgttacgatgccgaacaaattgtccgtgacagcgggcgagcggcaggtgatgaaccgctgtttggtccggtactcaatatcaaggtatttgattaccaactggatattcctgatgttcaggcgcaaacccataccctggcaaccggtccggttaatgaccttgaactggccctgttcccggatgtacacggtgatttgagtattgagatcctcgccaataaacagcgttacgatgagccaacgttaatccagcatgctgaacgcctgaaaatgctgattgcccagttcgccgcggatccggcgctgttgtgcggcgatgtcgatattatgctgccaggtgagtatgcgcagctggcgcagctcaacgccactcaggttgagattccagaaaccacgcttagcgcgctggtggcagaacaagcggcaaaaacaccggatgctccggcgctggcagatgcgcgttacctgttcagctatcgggaaatgcgcgagcaggtggtggcgctggcgaatctgctgcgtgagcgcggcgttaaaccaggggacagcgtggcggtggcactaccgcgctcggtctttttgaccctggcactccatgcgatagttgaagctggagcggcctggctaccgctggataccggctatccggacgatcgcctgaaaatgatgctggaagatgcgcgtccgtcgctgttaattaccaccgacgatcaactgccgcgctttagcgatgttcccaatttaacaagcctttgctataacgccccgcttacaccgcagggcagtgcgccgctgcaactttcacaaccgcatcacacggcttatatcatctttacctctggctccaccggcaggccgaaaggggtaatggtcgggcagacggctatcgtcaaccgcctgctttggatgcaaaatcattatccgcttacaggcgaagatgtcgttgcccaaaaaacgccgtgcagttttgatgtctcggtgtgggagtttttctggccgtttatcgcaggggcaaaactggtgatggctgaaccggaagcgcaccgcgacccgctcgctatgcagcaattctttgccgaatatggcgtaacgaccacgcactttgtgccgtcgatgctggcggcatttgttgcctcgctgacgccgcaaaccgctcgccagagttgcgcgacgttgaaacaggttttctgtagtggtgaggccttaccggctgatttatgccgcgaatggcaacagttaactggcgcgccgttgcataatctatatggcccgacggaagcggcggtagatgtcagctggtatccggcttttggcgaggaactggcacaggtgcgcggcagcagtgtgccgattggttatccggtatggaatacgggtctgcgtattcttgatgcgatgatgcatccggtgccgccgggtgtggcgggtgatctctatctcactggcattcaactggcgcagggctatctcggacgccccgatctgaccgccagccgctttattgccgatccttttgccccaggtgaacggatgtaccgtaccggagacgttgcccgctggctggataacggcgcggtggagtacctcgggcgcagtgatgatcagctaaaaattcgcgggcagcgtatcgaactgggcgaaatcgatcgcgtgatgcaggcgctgccggatgtcgaacaagccgttacccacgcctgtgtgattaaccaggcggctgccaccggtggtgatgcgcgtcaattggtgggctatctggtgtcgcaatcgggcctgccgttggataccagcgcattgcaggcgcagcttcgtgaaacattgccaccacatatggtaccggtggttctgctgcaacttccacagttaccacttagcgccaacggcaagctggatcgcaaagccttaccgttgcctgaactgaaggcacaagcgccagggcgtgcgccgaaagcgggcagtgaaacgattatcgccgcggcattctcgtcgttgctggggtgtgacgtgcaggatgccgatgctgatttcttcgcgcttggcggtcattcgctactggcaatgaaactggcagcgcagttaagtcggcaggttgcccgccaggtgacgccggggcaagtgatggtcgcgtcaactgtcgccaaactggcaacgattattgatgctgaagaagacagcacccggcgtatgggattcgaaaccattctgccgttgcgtgaaggtaatggcccgacgctgttttgtttccatcctgcgtccggttttgcctggcagttcagcgtgctctcgcgttatctcgatccacaatggtcgattatcggcattcagtcaccgcgccccaatggccccatgcagacggcggcaaacctggatgaagtctgcgaagcgcatctggcaacgttacttgaacaacaaccgcatggcccttattacctgctggggtattcccttggcggtacgctggcgcagggtattgcggcgcgactgcgtgcccgtggcgaacaggtggcatttcttggcttgctggatacctggccgccagaaacgcaaaactggcaggaaaaagaagctaatggtctggacccggaagtgctggcggagattaaccgcgaacgcgaggccttcctggcagcacagcagggaagtacttcaacggagttgtttaccaccattgaaggcaactacgctgatgctgtgcgcctgctgacgactgctcatagcgtaccgtttgacggtaaagcgacgctgtttgttgctgaacgcacacttcaggaaggtatgagtcccgaacgcgcctggtcgccgtggatagcggagctggatatctatcgtcaggattgtgcgcatgtggatattatctctccagggacgtttgaaaaaattgggccgattattcgcgcaacgctaaacaggtaa

SEQ ID NO: 276 - DNA, 630 bp, Escherichia coli
atggtcgatatgaaaactacgcatacctccctcccctttgccggacatacgctgcattttgttgagttcgatccggcgaatttttgtgagcaggatttactctggctgccgcactacgcacaactgcaacacgctggacgtaaacgtaaaacagagcatttagccggacggatcgctgctgtttatgctttgcgggaatatggctataaatgtgtgcccgcaatcggcgagctacgccaacctgtctggcctgcggaggtatacggcagtattagccactgtgggactacggcattagccgtggtatctcgtcaaccgattggcattgatatagaagaaattttttctgtacaaaccgcaagagaattgacagacaacattattacaccagcggaacacgagcgactcgcagactgcggtttagccttttctctggcgctgacactggcattttccgccaaagagagcgcatttaaggcaagtgagatccaaactgatgcaggttttctggactatcagataattagctggaataaacagcaggtcatcattcatcgtgagaatgagatgtttgctgtgcactggcagataaaagaaaagatagtcataacgctgtgccaacacgattaa

SEQ ID NO: 277 - DNA, 858 bp, Escherichia coli
atggctattccaaaattacaggcttacgcactgccggagtctcacgatattccgcagaataaagttgactgggcctttgaaccgcaacgtgccgcgttgttaatccatgatatgcaggactattttgtcagcttctggggcgagaactgcccgatgatggagcaggtgatcgcgaatattgctgcgctgcgcgactactgcaaacagcacaatatcccggtttattacaccgcccagccgaaagagcagagcgatgaagatcgggcgctgttgaatgatatgtgggggccgggcctgacccgctcgccggaacagcaaaaggtggtggatcgcctgacgccagatgccgacgacacggtgctggtgaagtggcgctacagcgcgtttcatcgttctccgctggagcaaatgctgaaagagagtggacgtaaccagctgattattaccggggtatatgcccacattggctgtatgaccaccgcaaccgacgcatttatgcgcgatattaaaccgtttatggtggcggatgcgctggccgatttcagccgtgacgagcatttgatgtcgctgaaatatgtggccggacgttctggccgggtggtgatgactgaagaattactgccagcacctatccccgccagcaaagcggcgctgcgtgaggtgatcctgccgttgctggacgagtccgatgaaccgttcgatgacgacaacctgatcgactacggtctggattcggtgcgcatgatggcgctggcggcgcgctggcgcaaagtgcatggtgatatcgactttgtcatgctggcgaaaaacccgaccatcgacgcctggtggaagctactctcccgcgaggtgaaataa

SEQ ID NO: 278 - DNA, 1671 bp, Escherichia coli
atgtcagtaagcgcatttaaccgacgctgggcggcggtcattctggaagcattaacgcgtcacggcgtcagacacatctgtatcgccccaggctcgcgttctacaccgttaacgttagcggcggcggagaattccgcattcattcaccacacccatttcgatgagcgtgggttggggcatctggcgctggggctggcgaaagtcagcaagcagccggtggcggtgattgtgacctccggcacggcggtggcaaatctctatccggcactgattgaagccgggttaaccggagaaaaactgattctcttaaccgccgatcgcccgccggagctaattgactgcggcgcgaatcaggcaattcgccagccgggaatgttcgcctctcaccccacgcacagtatttcattgccgcgcccgacccaggatatccccgcacgttggctggtttctaccatcgaccacgctctcggtacgcttcatgcggggggagtccatatcaactgcccgtttgctgaaccgctgtatggcgaaatggacgataccgggcttagctggcaacagcgtctgggtgactggtggcaggacgacaaaccgtggctgcgtgaagcgcctcgtctggaaagtgaaaaacagcgcgactggttcttctggcgacaaaagcgcggcgtggtggttgccgggcgcatgagtgcggaagagggcaaaaaagttgccctgtgggcgcaaactcttggctggccgctgattggcgatgtgctgtcacaaaccgggcagccgctgccgtgtgccgatctttggttaggcaatgccaaagcgaccagcgagctgcagcaggcgcaaattgtggtgcaactgggaagcagcctgacggggaaacggctcctgcaatggcaggcaagctgtgaaccagaagagtactggattgttgatgacattgaagggcgacttgatccggcacaccatcgcggacgtcgcttaattgccaatattgccgactggctggagctgcatccggcagaaaaacgccagccctggtgcgttgaaatcccgcgcctggcggaacaggcaatgcaggcggttattgcccgccgtgatgcgtttggcgaagcgcaactggcgcatcgcatctgcgactatctgcctgaacaggggcaattgtttgttggtaacagcctggtggtacgtctgattgatgcgctttcgcaacttccggcaggttacccggtgtacagcaaccgtggggccagcggtatcgacgggctgctttcgaccgccgccggcgttcagcgggcaagcggcaaaccgacgctggcgattgtgggcgatctctccgcactttacgatctcaacgcgctggcgttattgcgtcaggtttctgcgccgctggtattaattgtggtgaacaacaacggcgggcaaattttctcgctgttgccaacgccgcaaagcgagcgtgagcgtttctatctgatgccgcaaaacgtccattttgagcacgccgccgcgatgttcgagctgaaatatcatcgtccgcaaaactggcaggaacttgaaacggcatttgccgacgcctggcgcacgccaaccaccacggtgattgaaatggtggttaacgacaccgatggtgcgcaaacgctccagcaacttctggcgcaggtaagccatttatga

SEQ ID NO: 279 - DNA, 759 bp, Escherichia coli
atgatcctgcacgcgcaggcaaaacacggaaaaccaggtttaccctggctggtgtttttgcacggtttttccggcgattgccacgaatggcaagaagtgggcgaggcgtttgccgactactcacggttgtatgttgatctcccaggtcacggtggttcggcggcgattagcgtcgatggatttgatgatgtcaccgacttactgcgtaaaaccttggttagttacaacatccttgacttctggctggtggggtactcgcttggtggacgggtggcgatgatggcggcttgccaggggctggcggggctttgtggggttattgtcgaaggcgggcatccggggctgcaaaatgctgaacaacgtgcggaacgtcagcgttccgatcgccaatgggtgcagcgttttctcacagaaccgttaacggcggtatttgccgactggtatcaacagcctgtttttgcctcactcaatgacgatcaacgccgggagctggtggcgctgcgcagcaacaataatggcgcaacgcttgccgccatgctggaggcgacttctctcgccgtccagcctgatttacgtgctaaccttagcgcccgcacatttgcgttttattatttatgtggtgaacgtgacagcaaattccgcgccctggcggcggaactggctgccgactgccatgtcattcctcgcgccggacataacgcgcatcgggaaaatcccgctggcgtaatcgcaagtctggcgcagatcttgcgtttctga

SEQ ID NO: 280 - DNA, 963 bp, Escherichia coli
atgcgtagcgcgcaggtataccgctggcagatccccatggacgcgggggtggttctgcgcgacaggcggttaaaaacccgcgacgggctgtatgtttgcctgcgtgaaggcgagcgcgaagggtggggggagatctccccactgccgggcttcagtcaggaaacctgggaagaggcgcaaagtgtgctgcttgcctgggtaaataactggctggcaggcgattgcgagctaccgcagatgccttccgtggcctttggcgtaagctgtgcattggcagaactgacagatacgttgccgcaagcagccaactaccgtgcggcaccgctgtgtaatggcgatccggacgatctgatcctcaaacttgcagatatgccaggcgagaaagtggcgaaggtcaaagtgggattgtacgaagcggtgcgcgacggcatggtggtgaatctgttgctggaggcaattccggatctgcatttgcgtcttgacgcaaatcgcgcctggacaccgctgaaaggtcagcagtttgccaaatacgttaacccggattatcgcgaccgcatcgcgtttctcgaagagccgtgcaaaacccgcgatgattcgcgagcgtttgcccgtgaaaccggcattgccattgcctgggatgaaagcctgcgcgagccggattttgcctttgtggctgaagagggcgtgcgcgcggtagttatcaaacccacgctcacgggcagtctggaaaaagtacgcgagcaggtacaggcggcgcacgcgctggggctgacggcggtgatcagttcttccattgaatcgagcttaggcttaacgcaactggcgcggattgccgcctggttaacgccggacaccattccagggctggacacgctggatctgatgcaggcgcagcaggtacgtcgctggccgggtagcacgctgcctgtcgtggaagttgatgcactggagcggttgttatga

SEQ ID NO: 281 - DNA, 1356 bp, Escherichia coli
atgatcttctctgactggccgtggcgtcactggcggcaagtgcggggagaaaccatcgccttacgtcttaatgacgagcaactcaactggcgcgagctttgtgctcgcgtcgatgaattagcctccggatttgcggtgcagggggtggttgagggcagcggcgtgatgttgcgggcgtggaatacgccgcaaacgctgctcgcctggctggcgttactgcaatgcggggcgcgggtgttgcccgtgaaccctcagctgccgcaaccgttgcttgaagaattgctgcccaatctgacgctgcaatttgctctggtgccggatggggaaaacacgtttccggcattaacgtcgctgcacattcagctggttgaaggcgcacatgccgctacgtggcagccgacgcgtctgtgctcaatgacgttgacctcgggttctaccggtttgccgaaagccgctgtccatacttatcaggcccatcttgccagtgcgcaaggtgtgttatcgctgattccgtttggcgatcacgatgattggttgctctctttaccgctgtttcacgtctccggtcagggaattatgtggcgctggttatacgctggtgcgcggatgacggtacgtgataaacagccattggagcaaatgctggcaggctgtactcacgcttcactggtgccaacacaactctggcgtttgctggttaaccgtagttccgtttccctgaaagcggtgttacttggcggcgcggctatcccggtcgagttgacggaacaggcgcgcgagcaggggattcgttgcttttgcggctatggtctgaccgagtttgcctccacggtgtgtgcgaaagaagccgacggcctggcagacgttggttcgccgctgccgggtcgggaagtgaaaatcgttaataatgaagtgtggctgcgggctgccagtatggcagaaggttactggcgtaacgggcaactggtttcactggttaatgacgaaggctggtacgctacgcgcgatcgcggtgagatgcataatggcaagctgaccattgtcggacgtttagacaatctattcttcagtggcggagagggtattcagccggaagaagtcgagcgcgtaattgctgcacatcctgcggttttgcaggtgtttatcgtccccgttgccgacaaggagtttggtcatcgaccggtggcggtgatggagtatgaccacgagagcgttgatcttagtgaatgggtgaaagataagctggcccgttttcaacaaccggtgcgctggctaactctgccgccggagctgaaaaacggcggtattaaaatttcacgtcaggcgctaaaagagtgggtgcaacgtcagcaataa

SEQ ID NO: 282 - DNA, 858 bp, Escherichia coli
atgatttatcctgatgaagcaatgctttacgcaccggttgaatggcacgactgctccgaaggtttcgaggacattcgttatgaaaaatccaccgacggtatcgcaaaaatcaccattaatcgtccgcaggtgcgcaatgccttccgtcctctgacggtaaaagagatgatccaggcgctggcagatgcgcgttatgacgacaacatcggcgtgatcattctgactggtgcaggcgataaagcgttctgctccggtggtgaccagaaagtgcgtggtgattacggcggctataaagatgattccggcgtacatcacctgaatgtgctggacttccagcgtcagatccgtacctgtccgaaaccggttgtcgcgatggtggctggctactccatcggcggcggtcacgttctgcacatgatgtgcgacctgactatcgcggcagataatgccatcttcggtcagactggcccgaaagtcggttccttcgacggcggctggggcgcttcctacatggctcgcatcgtcgggcagaaaaaagcgcgtgaaatctggttcctgtgccgtcagtacgacgcaaaacaggcgctggatatgggccttgtgaacaccgtggtaccgctggcggatctggaaaaagaaaccgtccgttggtgccgcgaaatgctgcaaaacagcccgatggcgctgcgctgcctgaaagctgcactgaacgccgactgtgacgggcaggcggggctgcaggagctggcgggcaacgccaccatgctgttctacatgacggaagaaggtcaggaaggtcgcaacgccttcaaccagaaacgtcagcctgacttcagcaaattcaaacggaatccgtaa

SEQ ID NO: 283 - DNA, 927 bp, Escherichia coli
atgactgaacaacaaattagccgaactcaggcgtggctggaaagtttacgacctaaaaccctccccctcgcctttgctgcaattatcgtcgggacagcgctggcatggtggcaaggtcacttcgatccgctggtcgccctgctggcactaattaccgccgggctattacagatcctttctaacctcgccaatgattacggcgatgcggtaaaaggcagcgataaacctgaccgcattgggccgctacgcggcatgcaaaaaggggtcattacccagcaagagatgaaacgggcgctcattattaccgtcgtgctcatctgtctctccgggctggcactggttgcagtggcatgccatacgctggccgattttgtcggtttcctgattcttggcgggttgtcgatcattgccgctatcacctacaccgtgggcaatcgtccttatggttatatcggtctgggtgatatttccgtactggttttctttggctggttgagtgtcatggggagctggtatttacaggctcatacattgattccggcactgatccttccggcgaccgcatgcggcctgctggcaacggcagtactgaatattaataacctgcgtgatatcaatagcgaccgcgaaaatggcaaaaacacgctggtggtgcgcttaggtgaagtgaacgcgcgtcgttatcatgcctgcctgctgatgggctcgctggtgtgtctggcgctgtttaatctcttttcgctgcatagcctgtggggctggctgttcctgctggcggcaccattactggtgaagcaagcccgttatgtgatgcgggaaatggacccggtggcgatgcgaccaatgctggaacgtactgtcaagggagcgttactgactaacctgctgtttgttttagggatattcctaagccagtgggcagcataa

SEQ ID NO: 284 - DNA, 669 bp, Escherichia coli
atgccatcactcagtaaagaagcggccctggttcatgaagcgttagttgcgcgaggactggaaacaccgctgcgcccgcccgtgcatgaaatggataacgaaacgcgcaaaagccttattgctggtcatatgaccgaaatcatgcagctgctgaatctcgacctggctgatgacagtttgatggaaacgccgcatcgcatcgctaaaatgtatgtcgatgaaattttctccggtctggattacgccaatttcccgaaaatcaccctcattgaaaacaaaatgaaggtcgatgaaatggtcaccgtgcgcgatatcactctgaccagcacctgtgaacaccattttgttaccatcgatggcaaagcgacggtggcctatatcccgaaagattcggtgatcggtctgtcaaaaattaaccgcattgtgcagttctttgcccagcgtccgcaggtgcaggaacgtctgacgcagcaaattcttattgcgctacaaacgctgctgggcaccaataacgtggctgtctcgatcgacgcggtgcattactgcgtgaaggcgcgtggcatccgcgatgcaaccagtgccacgacaacgacctctcttggtggattgttcaaatccagtcagaatacgcgccacgagtttctgcgcgctgtgcgtcatcacaactga

SEQ ID NO: 285 - DNA, 453 bp, Escherichia coli
gtgaaggataaagtgtataagcgtcccgtttcgatcttagtggtcatctacgcacaagatacgaaacgggtgctgatgttgcagcggcgtgacgatcccgatttctggcagtcggtaaccggcagcgtggaagagggtgaaaccgcgccgcaagctgccatgcgcgaagtaaaggaagaggtcaccattgatgttgtcgctgaacaactgaccttaattgactgtcagcgcacggtagagtttgaaattttttcacatttacgtcatcgctatgcgccgggcgtgacgcgtaatacggaatcatggttctgtcttgcgcttccgcacgagcggcagatcgttttcactgaacatctggcttacaagtggcttgatgcgcctgctgcggcggcgctcactaagtcctggagcaaccggcaggcgattgaacagtttgtaattaacgctgcctga

SEQ ID NO: 286 - DNA, 369 bp, Escherichia coli
atggatattgtatttatagagcaactttcggtaatcaccactattggtgtttacgactgggaacagaccatcgaacagaagttagtgttcgatatcgaaatggcgtgggataaccgtaaagcggcgaaaagtgatgatgtggcggattgcctcagttacgctgacattgcagaaacggtggtcagccacgtcgagggggcgcgttttgcgctggtggaacgcgtggctgaagaggtggcggagctgctgttagcacgcttcaactcgccgtgggtgcgtatcaaactcagcaagccaggcgcagtggcgcgggcggcgaatgttggcgtaatcattgagcgtggcaataatctgaaagaaaataattaa

SEQ ID NO: 287 - DNA, 480 bp, Escherichia coli
atgacagtggcgtatattgccataggcagcaatctggcctctccgctggagcaggtcaatgctgccctgaaagcattaggcgatatccctgaaagccacattcttaccgtttcttcgttttaccgcaccccaccgctggggccgcaagatcaacccgattacttaaacgcagccgtggcgctggaaacctctcttgcacctgaagagctactcaatcacacacagcgtattgaattgcagcaaggtcgcgtccgcaaagctgaacgctggggaccacgcacgctggatctcgacatcatgctgtttggtaatgaagtgataaatactgaacgcctgaccgttccgcactacgatatgaagaatcgtggatttatgctgtggccgctgtttgaaatcgcgccggagttggtgtttcctgatggggagatgttgcgtcaaatcttacatacaagagcatttgacaaattaaacaaatggtaa

SEQ ID NO: 288 - DNA, 810 bp, Escherichia coli
atgttcttaattaacggtcataagcaggaatcgctggcagtaagcgatcgggcaacgcagtttggtgatggttgttttaccaccgccagagttatcgacggtaaagtcagtttgttatcggcgcatatccagcgactacaggatgcttgtcagcggttgatgatttcctgtgacttctggcctcagcttgaacaagagatgaaaacgctggcagcagaacagcaaaatggtgtgctgaaagtcgtgatcagtcgcggtagtggcgggcgagggtacagcacattgaacagcggaccggcaacgcggattctctccgttacggcttatcctgcacattacgaccgtttgcgtaacgaggggattacgttggcgctaagcccggtgcggctggggcgcaatcctcatcttgcaggtattaaacatctcaatcgtcttgagcaagtattgattcgctctcatcttgagcagacaaacgctgatgaggcgctggtccttgacagcgaagggtgggttacggaatgctgtgcggctaatttgttctggcggaagggcaacgtagtttatacgccgcgactggatcaggcaggtgttaacggcattatgcgacaattctgtatccgtttgctggcacaatcctcttatcagcttgtcgaagtgcaagcctctctggaagagtcgttgcaggcagatgagatggttatttgtaatgcgttaatgccagtgatgcccgtatgtgcctgtggcgatgtctccttttcgtcagcaacgttatatgaatatttagccccactttgtgagcgcccgaattag

SEQ ID NO: 289 - DNA, 849 bp, Escherichia coli
atgaaactctttgcccagggtacttcactggaccttagccatcctcacgtaatggggatcctcaacgtcacgcctgattccttttcggatggtggcacgcataactcgctgatagatgcggtgaaacatgcgaatctgatgatcaacgctggcgcgacgatcattgacgttggtggcgagtccacgcgcccaggggcggcggaagttagcgttgaagaagagttgcaacgtgttattcctgtggttgaggcaattgctcaacgcttcgaagtctggatctcagtcgatacatccaaaccagaagtcatccgtgagtcagcgaaagttggcgctcacattattaatgatatccgctccctttccgaacctggcgctctggaggcggctgcagaaaccggtttaccggtttgtctgatgcatatgcagggaaatccaaaaaccatgcaggaagctccgaagtatgacgatgtctttgcagaagtgaatcgctactttattgagcaaatagcacgttgcgagcaggcgggtatcgcaaaagagaaattgttgctcgaccccggattcggtttcggtaaaaatctctcccataactattcattactggcgcgcctggctgaatttcaccatttcaacctgccgctgttggtgggtatgtcacgaaaatcgatgattgggcagctgctgaacgtggggccgtccgagcgcctgagcggtagtctggcctgtgcggtcattgccgcaatgcaaggcgcgcacatcattcgtgttcatgacgtcaaagaaaccgtagaagcgatgcgggtggtggaagccactctgtctgcaaaggaaaacaaacgctatgagtaa

SEQ ID NO: 290 - DNA, 1269 bp, Escherichia coli
atgattatcaaacgcactcctcaagccgcgtcgcctctggcttcgtggctttcttatctggaaaacctgcacagtaaaactatcgatctcggccttgagcgcgtgagcctggtcgcggcgcgtcttggcgtcctgaaaccagcgccatttgtgtttaccgttgcgggtacgaatggcaaaggcaccacctgccgtacgctggagtcgattctgatggcggcagggtacaaagtgggcgtctacagttcgcctcatctggtgcgttataccgagcgcgtacgtgtgcagggccaggaattgccggaatcggcccacaccgcctcttttgcggagattgaatcggcacgcggtgatatttccctgacctatttcgagtacggtacgctgtcggcgttgtggctgttcaagcaggcacaacttgacgtggtgattctggaagtagggctgggcggtcgtctggacgcaaccaatattgtcgacgccgatgtcgcggtagtaaccagtattgcgctggatcataccgactggctgggtccagatcgcgaaagtattggtcgcgagaaagcaggcatcttccgcagcgaaaaaccggcaattgtcggtgagccggaaatgccttctaccattgctgatgtggcgcaggaaaaaggtgcactgttacaacgtcggggcgttgagtggaactattccgtcaccgatcatgactgggcgtttagcgatgctcacggcacgctggaaaatctgccgttgccgcttgtcccgcaaccgaatgccgcaacagcgctggcggcactgcgtgccagcgggctggaagtcagtgaaaatgccattcgcgacgggattgccagcgcaattttgccgggacgtttccagattgtgagcgagtcgccacgcgttatttttgatgtcgcgcataatccacatgcggcggaatatctcaccgggcgtatgaaagcgctaccgaaaaacgggcgcgtgctggcggttatcggtatgctacatgataaagatattgccggaactctggcctggttgaaaagcgtggttgatgactggtattgtgcgccactggaagggccgcgcggtgccacggcagaacaactgcttgagcatttgggtaacggcaaatcatttgatagcgttgcgcaggcatgggatgccgcaatggcggacgctaaagcggaagacaccgtgctggtgtgtggttctttccacacggtcgcacatgtcatggaagtgattgacgcgaggagaagcggtggcaagtaa

SEQ ID NO: 291 - DNA, 480 bp, Escherichia coli
atgatcagtctgattgcggcgttagcggtagatcgcgttatcggcatggaaaacgccatgccgtggaacctgcctgccgatctcgcctggtttaaacgcaacaccttaaataaacccgtgattatgggccgccatacctgggaatcaatcggtcgtccgttgccaggacgcaaaaatattatcctcagcagtcaaccgggtacggacgatcgcgtaacgtgggtgaagtcggtggatgaagccatcgcggcgtgtggtgacgtaccagaaatcatggtgattggcggcggtcgcgtttatgaacagttcttgccaaaagcgcaaaaactgtatctgacgcatatcgacgcagaagtggaaggcgacacccatttcccggattacgagccggatgactgggaatcggtattcagcgaattccacgatgctgatgcgcagaactctcacagctattgctttgagattctggagcggcggtaa

SEQ ID NO: 292 - DNA, 723 bp, Escherichia coli
atgggtaaaacccagcccttgccaatattaattactggcggaggtcgtcgcatcggcctcgccctcgcatggcatttcattaatcaaaagcaaccggtgattgtcagctatcggacacactatccagccattgatggactgattaatgcaggtgcgcagtgtattcaggctgatttttcgaccaacgacggtgtgatggcgtttgccgatgaagtactaaaaagcacccatggtctgcgtgctattttgcataacgccagtgcgtggatggcggaaaaaccgggtgcgccactggccgacgtactggcttgcatgatgcagatccacgttaataccccatacctgctcaaccatgcgctggaaagattactgcgtgggcacggacacgccgccagcgatatcattcactttaccgattatgtggtggagcgcggtagcgacaaacatattgcgtatgctgcaagcaaagcggcactggataatatgacccgctcgtttgcccgcaagctggcaccggaagtgaaagtgaattctattgcgccatcgctgatcctgtttaatgaacatgatgatgccgaatatcgacaacaggcgctgaataaatcactgatgaaaaccgcgcctggcgagaaagaagtgatcgacctggtcgattacttacttaccagttgctttgtcaccggacgcagtttcccacttgatggcggtcgtcatctgcgttaa

SEQ ID NO: 293 - DNA, 639 bp, Escherichia coli
atgaatattgtggtgcttatttccggcaacggaagtaatttacaggcaattattgacgcctgtaaaaccaacaaaattaaaggcaccgtacgggcagttttcagcaataaggccgacgcgttcggccttgaacgcgcccgccaggcgggtattgcaacgcatacgctcatcgccagcgcgtttgacagtcgtgaagcctatgaccgggagttgattcatgaaatcgacatgtacgcacccgatgtggtcgtgctggctggttttatgcgcattctcagcccggcgtttgtctcccactatgccgggcgtttgctgaacattcacccttctctgctgccgaaatatcccggattacacacccatcgtcaggcgctggaaaatggcgatgaagagcacggtacatcggtgcatttcgtcaccgatgaactggacggtggcccggttattttacaggcgaaagtcccggtatttgctggtgattcggaagatgacatcaccgcccgcgtgcaaacccaggaacacgccatttatccactggtgattagctggtttgccgatggtcgtctgaaaatgcacgaaaacgccgcgtggctggatggtcaacgtctgccgccgcagggctacgctgccgacgagtaa

SEQ ID NO: 294 - DNA, 867 bp, Escherichia coli
atggcagcaaagattattgacggtaaaacgattgcgcagcaggtgcgctctgaagttgctcaaaaagttcaggcgcgtattgcagccggactgcgggcaccaggactggccgttgtgctggtgggtagtaaccctgcatcgcaaatttatgtcgcaagcaaacgcaaggcttgtgaagaagtcgggttcgtctcccgctcttatgacctcccggaaaccaccagcgaagcggagctgctggagcttatcgatacgctgaatgccgacaacaccatcgatggcattctggttcaactgccgttaccggcgggtattgataacgtcaaagtgctggaacgtattcatccggacaaagacgtggacggtttccatccttacaacgtcggtcgtctgtgccagcgcgcgccgcgtctgcgtccctgcaccccgcgcggtatcgtcacgctgcttgagcgttacaacattgataccttcggcctcaacgccgtggtgattggcgcatcgaatatcgttggccgcccgatgagcatggaactgctgctggcaggttgcaccactacagtgactcaccgcttcactaaaaatctgcgtcatcacgtagaaaatgccgatctattgatcgttgccgttggcaagccaggctttattcccggtgactggatcaaagaaggcgcaattgtgattgatgtcggcatcaaccgtctggaaaatggcaaagttgtgggcgacgtcgtgtttgaagacgcggctaaacgcgcctcatacattacgcctgttcccggcggcgttggcccgatgacggttgccacgctgattgaaaacacgctacaggcgtgcgttgaatatcatgatccacaggatgagtaa

SEQ ID NO: 295 - DNA, 1191 bp, Escherichia coli; identical to SEQ ID NO: 239

SEQ ID NO: 296 - DNA, 135 bp, Escherichia coli
atggttcagtgtgttcgacattttgtcttaccgcgtctgaaaaaagacgctggcctgccgtttttcttcccgttgatcacccattcccagcccctcaatcgaggggcttttttttgcccaggcgtcaggagataa

SEQ ID NO: 297 - DNA, 936 bp, Escherichia coli
atggctaatccgctatatcagaaacatatcatttccataaacgaccttagtcgcgatgaccttaatctggtgctggcgacagcggcgaaactgaaagcaaacccgcaaccagagctgttgaagcacaaagtcattgccagctgtttcttcgaagcctctacccgtacccgcctctctttcgaaacatctatgcaccgcctgggggccagcgtggtgggcttctccgacagcgccaatacatcactgggtaaaaagggcgaaacgctggccgataccatttcggttatcagcacttacgtcgatgcgatagtgatgcgtcatccgcaggaaggtgcggcgcgcctggccaccgagttttccggcaatgtaccggtactgaatgccggtgatggctccaaccaacatccgacgcaaaccttgctggacttattcactattcaggaaacccaggggcgtctggacaatctccacgtcgcaatggttggtgacctgaaatatggccgcaccgttcactccctgactcaggcgttagcgaagttcgacggcaaccgtttttacttcatcgcgccggacgcgctggcaatgccgcaatacattctggatatgctcgatgaaaaagggatcgcatggagtctgcacagctctattgaagaagtgatggcggaagtagacatcctgtacatgacccgcgtgcaaaaagagcgtctggacccgtccgagtacgccaacgtgaaagcgcagtttgttcttcgcgccagcgatctccacaacgccaaagccaatatgaaagtgctgcatccgctgccgcgtgttgatgagattgcgacggatgttgataaaacgccacacgcctggtacttccagcaggcaggcaacgggattttcgctcgccaggcgttactggcactggttctgaatcgcgatctggtactgtaa

SEQ ID NO: 298 - DNA, 1350 bp, Escherichia coli
atgtctgaaattgttgtctccaaatttggcggtaccagcgtagctgattttgacgccatgaaccgcagcgctgatattgtgctttctgatgccaacgtgcgtttagttgtcctctcggcttctgctggtatcactaatctgctggtcgctttagctgaaggactggaacctggcgagcgattcgaaaaactcgacgctatccgcaacatccagtttgccattctggaacgtctgcgttacccgaacgttatccgtgaagagattgaacgtctgctggagaacattactgttctggcagaagcggcggcgctggcaacgtctccggcgctgacagatgagctggtcagccacggcgagctgatgtcgaccctgctgtttgttgagatcctgcgcgaacgcgatgttcaggcacagtggtttgatgtacgtaaagtgatgcgtaccaacgaccgatttggtcgtgcagagccagatatagccgcgctggcggaactggccgcgctgcagctgctcccacgtctcaatgaaggcttagtgatcacccagggatttatcggtagcgaaaataaaggtcgtacaacgacgcttggccgtggaggcagcgattatacggcagccttgctggcggaggctttacacgcatctcgtgttgatatctggaccgacgtcccgggcatctacaccaccgatccacgcgtagtttccgcagcaaaacgcattgatgaaatcgcgtttgccgaagcggcagagatggcaacttttggtgcaaaagtactgcatccggcaacgttgctacccgcagtacgcagcgatatcccggtctttgtcggctccagcaaagacccacgcgcaggtggtacgctggtgtgcaataaaactgaaaatccgccgctgttccgcgctctggcgcttcgtcgcaatcagactctgctcactttgcacagcctgaatatgctgcattctcgcggtttcctcgcggaagttttcggcatcctcgcgcggcataatatttcggtagacttaatcaccacgtcagaagtgagcgtggcattaacccttgataccaccggttcaacctccactggcgatacgttgctgacgcaatctctgctgatggagctttccgcactgtgtcgggtggaggtggaagaaggtctggcgctggtcgcgttgattggcaatgacctgtcaaaagcctgcggcgttggcaaagaggtattcggcgtactggaaccgttcaacattcgcatgatttgttatggcgcatccagccataacctgtgcttcctggtgcccggcgaagatgccgagcaggtggtgcaaaaactgcatagtaatttgtttgagtaa

SEQ ID NO: 299 - DNA, 2433 bp, Escherichia coli
atgagtgtgattgcgcaggcaggggcgaaaggtcgtcagctgcataaatttggtggcagtagtctggctgatgtgaagtgttatttgcgtgtcgcgggcattatggcggagtactctcagcctgacgatatgatggtggtttccgccgccggtagcaccactaaccagttgattaactggttgaaactaagccagaccgatcgtctctctgcgcatcaggttcaacaaacgctgcgtcgctatcagtgcgatctgattagcggtctgctacccgctgaagaagccgatagcctcattagcgcttttgtcagcgaccttgagcgcctggcggcgctgctcgacagcggtattaacgacgcagtgtatgcggaagtggtgggccacggggaagtatggtcggcacgtctgatgtctgcggtacttaatcaacaagggctgccagcggcctggcttgatgcccgcgagtttttacgcgctgaacgcgccgcacaaccgcaggttgatgaagggctttcttacccgttgctgcaacagctgctggtgcaacatccgggcaaacgtctggtggtgaccggatttatcagccgcaacaacgccggtgaaacggtgctgctggggcgtaacggttccgactattccgcgacacaaatcggtgcgctggcgggtgtttctcgcgtaaccatctggagcgacgtcgccggggtatacagtgccgacccgcgtaaagtgaaagatgcctgcctgctgccgttgctgcgtctggatgaggccagcgaactggcgcgcctggcggctcccgttcttcacgcccgtactttacagccggtttctggcagcgaaatcgacctgcaactgcgctgtagctacacgccggatcaaggttccacgcgcattgaacgcgtgctggcctccggtactggtgcgcgtattgtcaccagccacgatgatgtctgtttgattgagtttcaggtgcccgccagtcaggatttcaaactggcgcataaagagatcgaccaaatcctgaaacgcgcgcaggtacgcccgctggcggttggcgtacataacgatcgccagttgctgcaattttgctacacctcagaagtggccgacagtgcgctgaaaatcctcgacgaagcgggattacctggcgaactgcgcctgcgtcaggggctggcgctggtggcgatggtcggtgcaggcgtcacccgtaacccgctgcattgccaccgcttctggcagcaactgaaaggccagccggtcgaatttacctggcagtccgatgacggcatcagcctggtggcagtactgcgcaccggcccgaccgaaagcctgattcaggggctgcatcagtccgtcttccgcgcagaaaaacgcatcggcctggtattgttcggtaagggcaatatcggttcccgttggctggaactgttcgcccgtgagcagagcacgctttcggcacgtaccggctttgagtttgtgctggcaggtgtggtggacagccgccgcagcctgttgagctatgacgggctggacgccagccgcgcgttagccttcttcaacgatgaagcggttgagcaggatgaagagtcgttgttcctgtggatgcgcgcccatccgtatgatgatttagtggtgctggacgttaccgccagccagcagcttgctgatcagtatcttgatttcgccagccacggtttccacgttatcagcgccaacaaactggcgggagccagcgacagcaataaatatcgccagatccacgacgccttcgaaaaaaccgggcgtcactggctgtacaatgccaccgtcggtgcgggcttgccgatcaaccacaccgtgcgcgatctgatcgacagcggcgatactattttgtcgatcagcgggatcttctccggcacgctctcctggctgttcctgcaattcgacggtagcgtgccgtttaccgagctggtggatcaggcgtggcagcagggcttaaccgaacctgacccgcgtgacgatctctctggcaaagacgtgatgcgcaagctggtgattctggcgcgtgaagcaggttacaacatcgaaccggatcaggtacgtgtggaatcgctggtgcctgctcattgcgaaggcggcagcatcgaccatttctttgaaaatggcgatgaactgaacgagcagatggtgcaacggctggaagcggcccgcgaaatggggctggtgctgcgctacgtggcgcgtttcgatgccaacggtaaagcgcgtgtaggcgtggaagcggtgcgtgaagatcatccgttggcatcactgctgccgtgcgataacgtctttgccatcgaaagccgctggtatcgcgataaccctctggtgatccgcggacctggcgctgggcgcgacgtcaccgccggggcgattcagtcggatatcaaccggctggcacagttgttgtaa

SEQ ID NO: 300 - DNA, 2463 bp, Escherichia coli; identical to SEQ ID NO: 19

SEQ ID NO: 301 - DNA, 1104 bp, Escherichia coli
atgaaaaatgttggttttatcggctggcgcggtatggtcggctccgttctcatgcaacgcatggttgaagagcgcgacttcgacgccattcgccctgtcttcttttctacttctcagcttggccaggctgcgccgtcttttggcggaaccactggcacacttcaggatgcctttgatctggaggcgctaaaggccctcgatatcattgtgacctgtcagggcggcgattataccaacgaaatctatccaaagcttcgtgaaagcggatggcaaggttactggattgacgcagcatcgtctctgcgcatgaaagatgacgccatcatcattcttgaccccgtcaatcaggacgtcattaccgacggattaaataatggcatcaggacttttgttggcggtaactgtaccgtaagcctgatgttgatgtcgttgggtggtttattcgccaatgatcttgttgattgggtgtccgttgcaacctaccaggccgcttccggcggtggtgcgcgacatatgcgtgagttattaacccagatgggccatctgtatggccatgtggcagatgaactcgcgaccccgtcctctgctattctcgatatcgaacgcaaagtcacaaccttaacccgtagcggtgagctgccggtggataactttggcgtgccgctggcgggtagcctgattccgtggatcgacaaacagctcgataacggtcagagccgcgaagagtggaaagggcaggcggaaaccaacaagatcctcaacacatcttccgtaattccggtagatggtttatgtgtgcgtgtcggggcattgcgctgccacagccaggcattcactattaaattgaaaaaagatgtgtctattccgaccgtggaagaactgctggctgcgcacaatccgtgggcgaaagtcgttccgaacgatcgggaaatcactatgcgtgagctaaccccagctgccgttaccggcacgctgaccacgccggtaggccgcctgcgtaagctgaatatgggaccagagttcctgtcagcctttaccgtgggcgaccagctgctgtggggggccgcggagccgctgcgtcggatgcttcgtcaactggcgtaa

SEQ ID NO: 302 - DNA, 879 bp, Escherichia coli
atgttcacgggaagtattgtcgcgattgttactccgatggatgaaaaaggtaatgtctgtcgggctagcttgaaaaaactgattgattatcatgtcgccagcggtacttcggcgatcgtttctgttggcaccactggcgagtccgctaccttaaatcatgacgaacatgctgatgtggtgatgatgacgctggatctggctgatgggcgcattccggtaattgccgggaccggcgctaacgctactgcggaagccattagcctgacgcagcgcttcaatgacagtggtatcgtcggctgcctgacggtaaccccttactacaatcgtccgtcgcaagaaggtttgtatcagcatttcaaagccatcgctgagcatactgacctgccgcaaattctgtataatgtgccgtcccgtactggctgcgatctgctcccggaaacggtgggccgtctggcgaaagtaaaaaatattatcggaatcaaagaggcaacagggaacttaacgcgtgtaaaccagatcaaagagctggtttcagatgattttgttctgctgagcggcgatgatgcgagcgcgctggacttcatgcaattgggcggtcatggggttatttccgttacggctaacgtcgcagcgcgtgatatggcccagatgtgcaaactggcagcagaagggcattttgccgaggcacgcgttattaatcagcgtctgatgccattacacaacaaactatttgtcgaacccaatccaatcccggtgaaatgggcatgtaaggaactgggtcttgtggcgaccgatacgctgcgcctgccaatgacaccaatcaccgacagtggtcgtgagacggtcagagcggcgcttaagcatgccggtttgctgtaa

SEQ ID NO: 303 - DNA, 930 bp, Escherichia coli
atgccgattcgtgtgccggacgagctacccgccgtcaatttcttgcgtgaagaaaacgtctttgtgatgacaacttctcgtgcgtctggtcaggaaattcgtccacttaaggttctgatccttaacctgatgccgaagaagattgaaactgaaaatcagtttctgcgcctgctttcaaactcacctttgcaggtcgatattcagctgttgcgcatcgattcccgtgaatcgcgcaacacgcccgcagagcatctgaacaacttctactgtaactttgaagatattcaggatcagaactttgacggtttgattgtaactggtgcgccgctgggcctggtggagtttaatgatgtcgcttactggccgcagatcaaacaggtgctggagtggtcgaaagatcacgtcacctcgacgctgtttgtctgctgggcggtacaggccgcgctcaatatcctctacggcattcctaagcaaactcgcaccgaaaaactctctggcgtttacgagcatcatattctccatcctcatgcgcttctgacgcgtggctttgatgattcattcctggcaccgcattcgcgctatgctgactttccggcagcgttgattcgtgattacaccgatctggaaattctggcagagacggaagaaggggatgcatatctgtttgccagtaaagataagcgcattgcctttgtgacgggccatcccgaatatgatgcgcaaacgctggcgcaggaatttttccgcgatgtggaagccggactagacccggatgtaccgtataactatttcccgcacaatgatccgcaaaatacaccgcgagcgagctggcgtagtcacggtaatttactgtttaccaactggctcaactattacgtctaccagatcacgccatacgatctacggcacatgaatccaacgctggattaa

SEQ ID NO: 304 - DNA, 1161 bp, Escherichia coli
atgacgcgtaaacaggccaccatcgcagtgcgtagcgggttaaatgacgacgaacagtatggttgcgttgtcccaccgatccatctttccagcacctataactttaccggatttaatgaaccgcgcgcgcatgattactcgcgtcgcggcaacccaacgcgcgatgtggttcagcgtgcgctggcagaactggaaggtggtgctggtgcagtacttactaataccggcatgtccgcgattcacctggtaacgaccgtctttttgaaacctggcgatctgctggttgcgccgcacgactgctacggcggtagctatcgcctgttcgacagtctggcgaaacgcggttgctatcgcgtgttgtttgttgatcaaggcgatgaacaggcattacgggcagcgctggcagaaaaacccaaactggtactggtagaaagcccaagtaatccattgttacgcgtcgtggatattgcgaaaatctgccatctggcaagggaagtcggggcggtgagcgtggtggataacaccttcttaagcccggcattacaaaatccgctggcattaggtgccgatctggtgttgcattcatgcacgaaatatctgaacggtcactcagacgtagtggccggcgtggtgattgctaaagacccggacgttgtcactgaactggcctggtgggcaaacaatattggcgtgacgggcggcgcgtttgacagctatctgctgctacgtgggttgcgaacgctggtgccgcgtatggagctggcgcagcgcaacgcgcaggcgattgtgaaatacctgcaaacccagccgttggtgaaaaaactgtatcacccgtcgttgccggaaaatcaggggcatgaaattgccgcgcgccagcaaaaaggctttggcgcaatgttgagttttgaactggatggcgatgagcagacgctgcgtcgtttcctgggcgggctgtcgttgtttacgctggcggaatcattagggggagtggaaagtttaatctctcacgccgcaaccatgacacatgcaggcatggcaccagaagcgcgtgctgccgccgggatctccgagacgctgctgcgtatctccaccggtattgaagatggcgaagatttaattgccgacctggaaaatggcttccgggctgcaaacaaggggtaa

SEQ ID NO: 305 - DNA, 912 bp, Escherichia coli
gtgagtacattagaacaaacaataggcaatacgcctctggtgaagttgcagcgaatggggccggataacggcagtgaagtgtggttaaaactggaaggcaataacccggcaggttcggtgaaagatcgtgcggcactttcgatgatcgtcgaggcggaaaagcgcggggaaattaaaccgggtgatgtcttaatcgaagccaccagtggtaacaccggcattgcgctggcaatgattgccgcgctgaaaggctatcgcatgaaattgctgatgcccgacaacatgagccaggaacgccgtgcggcgatgcgtgcttatggtgcggaactgattcttgtcaccaaagagcagggcatggaaggtgcgcgcgatctggcgctggagatggcgaatcgtggcgaaggaaagctgctcgatcagttcaataatcccgataacccttatgcgcattacaccaccactgggccggaaatctggcagcaaaccggcgggcgcatcactcattttgtctccagcatggggacgaccggcactatcaccggcgtctcacgctttatgcgcgaacaatccaaaccggtgaccattgtcggcctgcaaccggaagagggcagcagcattcccggcattcgccgctggcctacggaatatctgccggggattttcaacgcttctctggtggatgaggtgctggatattcatcagcgcgatgcggaaaacaccatgcgcgaactggcggtgcgggaaggaatattctgtggcgtcagctccggcggcgcggttgccggagcactgcgggtggcaaaagctaaccctgacgcggtggtggtggcgatcatctgcgatcgtggcgatcgctacctttctaccggggtgtttggggaagagcattttagccagggggcggggatttaa

SEQ ID NO: 306 - DNA, 972 bp, Escherichia coli
atgagtaagatttttgaagataactcgctgactatcggtcacacgccgctggttcgcctgaatcgcatcggtaacggacgcattctggcgaaggtggaatctcgtaaccccagcttcagcgttaagtgccgtatcggtgccaacatgatttgggatgccgaaaagcgcggcgtgctgaaaccaggcgttgaactggttgaaccgaccagcggtaataccgggattgcactggcctatgtagctgccgctcgcggttacaaactcaccctgaccatgccagaaaccatgagtattgaacgccgcaagctgctgaaagcgttaggtgcaaacctggtgctgacggaaggtgctaaaggcatgaaaggcgcaatccaaaaagcagaagaaattgtcgccagcaatccagagaaatacctgctgctgcaacaattcagcaatccggcaaaccctgaaattcacgaaaagaccaccggtccggagatatgggaagataccgacggtcaggttgatgtatttattgctggcgttgggactggcggtacgctgactggcgtcagccgctacattaaaggcaccaaaggcaagaccgatcttatctctgtcgccgttgagccaaccgattctccagttatcgcccaggcgctggcaggtgaagagattaaacctggcccgcataaaattcagggtattggcgctggttttatcccggctaacctcgatctcaagctggtcgataaagtcattggcatcaccaatgaagaagcgatttctaccgcgcgtcgtctgatggaagaagaaggtattcttgcaggtatctcttctggagcagctgttgccgcggcgttgaaactacaagaagatgaaagctttaccaacaagaatattgtggttattctaccatcatcgggtgagcgttatttaagcaccgcattgtttgccgatctcttcactgagaaagaattgcaacagtaa

SEQ ID NO: 307 - DNA, 1173 bp, Escherichia coli
atgttcgatttttcaaaggtcgtggatcgtcatggcacatggtgtacacagtgggattatgtcgctgaccgtttcggcactgctgacctgttaccgttcacgatttcagacatggattttgccactgccccctgcattatcgaggcgctgaatcagcgcctgatgcacggcgtatttggctacagccgctggaaaaacgatgagtttctcgcggctattgcccactggttttccacccagcattacaccgccatcgattctcagacggtggtgtatggcccttctgtcatctatatggtttcagaactgattcgtcagtggtctgaaacaggtgaaggcgtggtgatccacacacccgcctatgacgcattttacaaggccattgaaggtaaccagcgcacagtaatgcccgttgctttagagaagcaggctgatggttggttttgcgatatgggcaagttggaagccgtgttggcgaaaccagaatgtaaaattatgctcctgtgtagcccacagaatcctaccgggaaagtgtggacgtgcgatgagctggagatcatggctgacctgtgcgagcgtcatggtgtgcgggttatttccgatgaaatccatatggatatggtttggggcgagcagccgcatattccctggagtaatgtggctcgcggagactgggcgttgctaacgtcgggctcgaaaagtttcaatattcccgccctgaccggtgcttacgggattatagaaaatagcagtagccgcgatgcctatttatcggcactgaaaggccgtgatgggctttcttccccttcggtactggcgttaactgcccatatcgccgcctatcagcaaggcgcgccgtggctggatgccttacgcatctatctgaaagataacctgacgtatatcgcagataaaatgaacgccgcgtttcctgaactcaactggcagatcccacaatccacttatctggcatggcttgatttacgtccgttgaatattgacgacaacgcgttgcaaaaagcacttatcgaacaagaaaaagtcgcgatcatgccggggtatacctacggtgaagaaggtcgtggttttgtccgtctcaatgccggctgcccacgttcgaaactggaaaaaggtgtggctggattaattaacgccatccgcgctgttcgttaa

SEQ ID NO: 308 - DNA, 1188 bp, Escherichia coli
atggcggacaaaaagcttgatactcaactggtgaatgcaggacgcagcaaaaaatacactctcggcgcggtaaatagcgtgattcagcgcgcttcttcgctggtctttgacagtgtagaagccaaaaaacacgcgacacgtaatcgcgccaatggagagttgttctatggacggcgcggaacgttaacccatttctccttacaacaagcgatgtgtgaactggaaggtggcgcaggctgcgtgctatttccctgcggggcggcagcggttgctaattccattcttgcttttatcgaacagggcgatcatgtgttgatgaccaacaccgcctatgaaccgagtcaggatttctgtagcaaaatcctcagcaaactgggcgtaacgacatcatggtttgatccgctgattggtgccgatatcgttaagcatctgcagccaaacactaaaatcgtgtttctggaatcgccaggctccatcaccatggaagtccacgacgttccggcgattgttgccgccgtacgcagtgtggtgccggatgccatcattatgatcgacaacacctgggcagccggtgtgctgtttaaggcgctggattttggcatcgatgtttctattcaagccgccaccaaatatctggttgggcattcagatgcgatgattggcactgccgtgtgcaatgcccgttgctgggagcagctacgggaaaatgcctatctgatgggccagatggtcgatgccgataccgcctatataaccagccgtggcctgcgcacattaggtgtgcgtttgcgtcaacatcatgaaagcagtctgaaagtggctgaatggctggcagaacatccgcaagttgcgcgagttaaccaccctgctctgcctggcagtaaaggtcacgaattctggaaacgagactttacaggcagcagcgggctattttcctttgtgcttaagaaaaaactcaataatgaagagctggcgaactatctggataacttcagtttattcagcatggcctactcgtggggcgggtatgaatcgttgatcctggcaaatcaaccagaacatatcgccgccattcgcccacaaggcgagatcgattttagcgggaccttgattcgcctgcatattggtctggaagatgtcgacgatctgattgccgatctggacgccggttttgcgcgaattgtataa

SEQ ID NO: 309 - DNA, 2262 bp, Escherichia coli
atgacaatattgaatcacaccctcggtttccctcgcgttggcctgcgtcgcgagctgaaaaaagcgcaagaaagttattgggcggggaactccacgcgtgaagaactgctggcggtagggcgtgaattgcgtgctcgtcactgggatcaacaaaagcaagcgggtatcgacctgctgccggtgggcgattttgcctggtacgatcatgtactgaccaccagtctgctgctgggtaacgttccggcgcgtcatcagaacaaagatggttcggtagatatcgacaccctgttccgtattggtcgtggacgtgcgccgactggcgaacctgcggcggcagcggaaatgaccaaatggtttaacaccaactatcactacatggtgccggagttcgttaaaggccaacagttcaaactgacctggacgcagctgctggacgaagtggacgaggcgctggcgctgggccacaaggtgaaacctgtgctgctggggccggttacctggctgtggctggggaaagtgaaaggtgaacaatttgaccgcctgagcctgctgaacgacattctgccggtttatcagcaagtgctggcagaactggcgaaacgcggcatcgagtgggtacagattgatgaacccgcgctggtactggaactaccacaggcgtggctggacgcatacaaacccgcttacgacgcgctccagggacaggtgaaactgctgctgaccacctattttgaaggcgtaacgccaaatctcgacacgattactgcgctgcctgttcagggtctgcatgttgacctcgtacatggtaaagatgacgttgctgaactgcacaagcgcctgccttctgactggttgctgtctgcgggtctgatcaatggtcgtaacgtctggcgcgccgatcttaccgagaaatatgcgcaaattaaggacattgtcggcaaacgtgatttgtgggtggcatcttcctgctcgttgctgcacagccccatcgacctgagcgtggaaacgcgtcttgatgcagaagtgaaaagctggtttgccttcgccctacaaaaatgccatgaactggcactgctgcgcgatgcgctgaacagtggtgacacggcagctctggcagagtggagcgccccgattcaggcacgtcgtcactctacccgcgtacataatccggcggtagaaaagcgtctggcggcgatcaccgcccaggacagccagcgtgcgaatgtctatgaagtgcgtgctgaagcccagcgtgcgcgttttaaactgccagcgtggccgaccaccacgattggttccttcccgcaaaccacggaaattcgtaccctgcgtctggatttcaaaaagggcaatctcgacgccaacaactaccgcacgggcattgcggaacatatcaagcaggccattgttgagcaggaacgtttgggactggatgtgctggtacatggcgaggccgagcgtaatgacatggtggaatactttggcgagcacctcgacggatttgtctttacgcaaaacggttgggtacagagctacggttcccgctgcgtgaagccaccgattgtcattggtgacattagccgcccggcaccgattaccgtggagtgggcgaagtatgcgcaatcgctgaccgacaaaccggtgaaagggatgctgacggggccggtgaccatactctgctggtcgttcccgcgtgaagatgtcagccgtgaaaccatcgccaaacagattgcgctggcgctgcgtgatgaagtggccgatctggaagccgctggaattggcatcatccagattgacgaaccggcgctgcgcgaaggtttaccgctgcgtcgtagcgactgggatgcgtatctccagtggggcgtagaggccttccgtatcaacgccgccgtggcgaaagatgacacacaaatccacactcacatgtgttattgcgagttcaacgacatcatggattcgattgcggcgctggacgcagacgtcatcaccatcgaaacctcgcgttccgacatggagttgctggagtcgtttgaagagtttgattatccaaatgaaatcggtcctggcgtctatgacattcactcgccaaacgtaccgagcgtggaatggattgaagccttgctgaagaaagcggcaaaacgcattccggcagagcgcctgtgggtcaacccggactgtggcctgaaaacgcgcggctggccagaaacccgcgcggcactggcgaacatggtgcaggcggcgcagaacttgcgtcgggggtaa

SEQ ID NO: 310 - DNA, 3684 bp, Escherichia coli
gtgagcagcaaagtggaacaactgcgtgcgcagttaaatgaacgtattctggtgctggacggcggtatgggcaccatgatccagagttatcgactgaacgaagccgattttcgtggtgaacgctttgccgactggccatgcgacctcaaaggcaacaacgacctgctggtactcagtaaaccggaagtgatcgccgctatccacaacgcctactttgaagcgggcgcggatatcatcgaaaccaacaccttcaactccacgaccattgcgatggcggattaccagatggaatccctgtcggcggaaatcaactttgcggcggcgaaactggcgcgagcttgtgctgacgagtggaccgcgcgcacgccagagaaaccgcgctacgttgccggtgttctcggcccgaccaaccgcacggcgtctatttctccggacgtcaacgatccggcatttcgtaatatcacttttgacgggctggtggcggcttatcgagagtccaccaaagcgctggtggaaggtggcgcggatctgatcctgattgaaaccgttttcgacacccttaacgccaaagcggcggtatttgcggtgaaaacggagtttgaagcgctgggcgttgagctgccgattatgatctccggcaccatcaccgacgcctccgggcgcacgctctccgggcagaccaccgaagcattttacaactcattgcgccacgccgaagctctgacctttggcctgaactgtgcgctggggcccgatgaactgcgccagtacgtgcaggagctgtcacggattgcggaatgctacgtcaccgcgcacccgaacgccgggctacccaacgcctttggtgagtacgatctcgacgccgacacgatggcaaaacagatacgtgaatgggcgcaagcgggttttctcaatatcgtcggcggctgctgtggcaccacgccacaacatattgcagcgatgagtcgtgcagtagaaggattagcgccgcgcaaactgccggaaattcccgtagcctgccgtttgtccggcctggagccgctgaacattggcgaagatagcctgtttgtgaacgtgggtgaacgcaccaacgtcaccggttccgctaagttcaagcgcctgatcaaagaagagaaatacagcgaggcgctggatgtcgcgcgtcaacaggtggaaaacggcgcgcagattatcgatatcaacatggatgaagggatgctcgatgccgaagcggcgatggtgcgttttctcaatctgattgccggtgaaccggatatcgctcgcgtgccgattatgatcgactcctcaaaatgggacgtcattgaaaaaggtctgaagtgtatccagggcaaaggcattgttaactctatctcgatgaaagagggcgtcgatgcctttatccatcacgcgaaattgttgcgtcgctacggtgcggcagtggtggtaatggcctttgacgaacagggacaggccgatactcgcgcacggaaaatcgagatttgccgtcgggcgtacaaaatcctcaccgaagaggttggcttcccgccagaagatatcatcttcgacccaaacatcttcgcggtcgcaactggcattgaagagcacaacaactacgcgcaggactttatcggcgcgtgtgaagacatcaaacgcgaactgccgcacgcgctgatttccggcggcgtatctaacgtttctttctcgttccgtggcaacgatccggtgcgcgaagccattcacgcagtgttcctctactacgctattcgcaatggcatggatatggggatcgtcaacgccgggcaactggcgatttacgacgacctacccgctgaactgcgcgacgcggtggaagatgtgattcttaatcgtcgcgacgatggcaccgagcgtttactggagcttgccgagaaatatcgcggcagcaaaaccgacgacaccgccaacgcccagcaggcggagtggcgctcgtgggaagtgaataaacgtctggaatactcgctggtcaaaggcattaccgagtttatcgagcaggataccgaagaagcccgccagcaggctacgcgcccgattgaagtgattgaaggcccgttgatggacggcatgaatgtggtcggcgacctgtttggcgaagggaaaatgttcctgccacaggtggtcaaatcggcgcgcgtcatgaaacaggcggtggcctacctcgaaccgtttattgaagccagcaaagagcagggcaaaaccaacggcaagatggtgatcgccaccgtgaagggcgacgtccacgacatcggtaaaaatatcgttggtgtggtgctgcaatgtaacaactacgaaattgtcgatctcggcgttatggtgcctgcggaaaaaattctccgtaccgctaaagaagtgaatgctgatctgattggcctttcggggcttatcacgccgtcgctggacgagatggttaacgtggcgaaagagatggagcgtcagggcttcactattccgttactgattggcggcgcgacgacctcaaaagcgcacacggcggtgaaaatcgagcagaactacagcggcccgacggtgtatgtgcagaatgcctcgcgtaccgttggtgtggtggcggcgctgctttccgatacccagcgtgatgattttgtcgctcgtacccgcaaggagtacgaaaccgtacgtattcagcacgggcgcaagaaaccgcgcacaccaccggtcacgctggaagcggcgcgcgataacgatttcgcttttgactggcaggcttacacgccgccggtggcgcaccgtctcggcgtgcaggaagtcgaagccagcatcgaaacgctgcgtaattacatcgactggacaccgttctttatgacctggtcgctggccgggaagtatccgcgcattctggaagatgaagtggtgggcgttgaggcgcagcggctgtttaaagacgccaacgacatgctggataaattaagcgccgagaaaacgctgaatccgcgtggcgtggtgggcctgttcccggcaaaccgtgtgggcgatgacattgaaatctaccgtgacgaaacgcgtacccatgtgatcaacgtcagccaccatctgcgtcaacagaccgaaaaaacaggcttcgctaactactgtctcgctgacttcgttgcgccgaagctttctggtaaagcagattacatcggcgcatttgccgtgactggcgggctggaagaggacgcactggctgatgcctttgaagcgcagcacgatgattacaacaaaatcatggtgaaagcgcttgccgaccgtttagccgaagcctttgcggagtatctccatgagcgtgtgcgtaaagtctactggggctatgcgccgaacgagaacctcagcaacgaagagctgatccgcgaaaactaccagggcatccgtccggcaccgggctatccggcctgcccggaacatacggaaaaagccaccatctgggagctgctggaagtggaaaaacacactggcatgaaactcacagaatctttcgccatgtggcccggtgcatcggtttcgggttggtacttcagccacccggacagcaagtactacgctgtagcacaaattcagcgcgatcaggttgaagattatgcccgccgtaaaggtatgagcgttaccgaagttgagcgctggctggcaccgaatctggggtatgacgcggactga

SEQ ID NO: 311 - DNA, 1155 bp, Escherichia coli
atggcaaaacacctttttacgtccgagtccgtctctgaagggcatcctgacaaaattgctgaccaaatttctgatgccgttttagacgcgatcctcgaacaggatccgaaagcacgcgttgcttgcgaaacctacgtaaaaaccggcatggttttagttggcggcgaaatcaccaccagcgcctgggtagacatcgaagagatcacccgtaacaccgttcgcgaaattggctatgtgcattccgacatgggctttgacgctaactcctgtgcggttctgagcgctatcggcaaacagtctcctgacatcaaccagggcgttgaccgtgccgatccgctggaacagggcgcgggtgaccagggtctgatgtttggctacgcaactaatgaaaccgacgtgctgatgccagcacctatcacctatgcacaccgtctggtacagcgtcaggctgaagtgcgtaaaaacggcactctgccgtggctgcgcccggacgcgaaaagccaggtgacttttcagtatgacgacggcaaaatcgttggtatcgatgctgtcgtgctttccactcagcactctgaagagatcgaccagaaatcgctgcaagaagcggtaatggaagagatcatcaagccaattctgcccgctgaatggctgacttctgccaccaaattcttcatcaacccgaccggtcgtttcgttatcggtggcccaatgggtgactgcggtctgactggtcgtaaaattatcgttgatacctacggcggcatggcgcgtcacggtggcggtgcattctctggtaaagatccatcaaaagtggaccgttccgcagcctacgcagcacgttatgtcgcgaaaaacatcgttgctgctggcctggccgatcgttgtgaaattcaggtttcctacgcaatcggcgtggctgaaccgacctccatcatggtagaaactttcggtactgagaaagtgccttctgaacaactgaccctgctggtacgtgagttcttcgacctgcgcccatacggtctgattcagatgctggatctgctgcacccgatctacaaagaaaccgcagcatacggtcactttggtcgtgaacatttcccgtgggaaaaaaccgacaaagcgcagctgctgcgcgatgctgccggtctgaagtaa

SEQ ID NO: 312 - DNA, 933 bp, Escherichia coli
atggttaaagtttatgccccggcttccagtgccaatatgagcgtcgggtttgatgtgctcggggcggcggtgacacctgttgatggtgcattgctcggagatgtagtcacggttgaggcggcagagacattcagtctcaacaacctcggacgctttgccgataagctgccgtcagaaccacgggaaaatatcgtttatcagtgctgggagcgtttttgccaggaactgggtaagcaaattccagtggcgatgaccctggaaaagaatatgccgatcggttcgggcttaggctccagtgcctgttcggtggtcgcggcgctgatggcgatgaatgaacactgcggcaagccgcttaatgacactcgtttgctggctttgatgggcgagctggaaggccgtatctccggcagcattcattacgacaacgtggcaccgtgttttctcggtggtatgcagttgatgatcgaagaaaacgacatcatcagccagcaagtgccagggtttgatgagtggctgtgggtgctggcgtatccggggattaaagtctcgacggcagaagccagggctattttaccggcgcagtatcgccgccaggattgcattgcgcacgggcgacatctggcaggcttcattcacgcctgctattcccgtcagcctgagcttgccgcgaagctgatgaaagatgttatcgctgaaccctaccgtgaacggttactgccaggcttccggcaggcgcggcaggcggtcgcggaaatcggcgcggtagcgagcggtatctccggctccggcccgaccttgttcgctctgtgtgacaagccggaaaccgcccagcgcgttgccgactggttgggtaagaactacctgcaaaatcaggaaggttttgttcatatttgccggctggatacggcgggcgcacgagtactggaaaactaa

SEQ ID NO: 313 - DNA, 1287 bp, Escherichia coli
atgaaactctacaatctgaaagatcacaacgagcaggtcagctttgcgcaagccgtaacccaggggttgggcaaaaatcaggggctgttttttccgcacgacctgccggaattcagcctgactgaaattgatgagatgctgaagctggattttgtcacccgcagtgcgaagatcctctcggcgtttattggtgatgaaatcccacaggaaatcctggaagagcgcgtgcgcgcggcgtttgccttcccggctccggtcgccaatgttgaaagcgatgtcggttgtctggaattgttccacgggccaacgctggcatttaaagatttcggcggtcgctttatggcacaaatgctgacccatattgcgggtgataagccagtgaccattctgaccgcgacctccggtgataccggagcggcagtggctcatgctttctacggtttaccgaatgtgaaagtggttatcctctatccacgaggcaaaatcagtccactgcaagaaaaactgttctgtacattgggcggcaatatcgaaactgttgccatcgacggcgatttcgatgcctgtcaggcgctggtgaagcaggcgtttgatgatgaagaactgaaagtggcgctagggttaaactcggctaactcgattaacatcagccgtttgctggcgcagatttgctactactttgaagctgttgcgcagctgccgcaggagacgcgcaaccagctggttgtctcggtgccaagcggaaacttcggcgatttgacggcgggtctgctggcgaagtcactcggtctgccggtgaaacgttttattgctgcgaccaacgtgaacgataccgtgccacgtttcctgcacgacggtcagtggtcacccaaagcgactcaggcgacgttatccaacgcgatggacgtgagtcagccgaacaactggccgcgtgtggaagagttgttccgccgcaaaatctggcaactgaaagagctgggttatgcagccgtggatgatgaaaccacgcaacagacaatgcgtgagttaaaagaactgggctacacttcggagccgcacgctgccgtagcttatcgtgcgctgcgtgatcagttgaatccaggcgaatatggcttgttcctcggcaccgcgcatccggcgaaatttaaagagagcgtggaagcgattctcggtgaaacgttggatctgccaaaagagctggcagaacgtgctgatttacccttgctttcacataatctgcccgccgattttgctgcgttgcgtaaattgatgatgaatcatcagtaa

SEQ ID NO: 314 - DNA, 1545 bp, Escherichia coli
atggctgactcgcaacccctgtccggtgctccggaaggtgccgaatatttaagagcagtgctgcgcgcgccggtttacgaggcggcgcaggttacgccgctacaaaaaatggaaaaactgtcgtcgcgtcttgataacgtcattctggtgaagcgcgaagatcgccagccagtgcacagctttaagctgcgcggcgcatacgccatgatggcgggcctgacggaagaacagaaagcgcacggcgtgatcactgcttctgcgggtaaccacgcgcagggcgtcgcgttttcttctgcgcggttaggcgtgaaggccctgatcgttatgccaaccgccaccgccgacatcaaagtcgacgcggtgcgcggcttcggcggcgaagtgctgctccacggcgcgaactttgatgaagcgaaagccaaagcgatcgaactgtcacagcagcaggggttcacctgggtgccgccgttcgaccatccgatggtgattgccgggcaaggcacgctggcgctggaactgctccagcaggacgcccatctcgaccgcgtatttgtgccagtcggcggcggcggtctggctgctggcgtggcggtgctgatcaaacaactgatgccgcaaatcaaagtgatcgccgtagaagcggaagactccgcctgcctgaaagcagcgctggatgcgggtcatccggttgatctgccgcgcgtagggctatttgctgaaggcgtagcggtaaaacgcatcggtgacgaaaccttccgtttatgccaggagtatctcgacgacatcatcaccgtcgatagcgatgcgatctgtgcggcgatgaaggatttattcgaagatgtgcgcgcggtggcggaaccctctggcgcgctggcgctggcgggaatgaaaaaatatatcgccctgcacaacattcgcggcgaacggctggcgcatattctttccggtgccaacgtgaacttccacggcctgcgctacgtctcagaacgctgcgaactgggcgaacagcgtgaagcgttgttggcggtgaccattccggaagaaaaaggcagcttcctcaaattctgccaactgcttggcgggcgttcggtcaccgagttcaactaccgttttgccgatgccaaaaacgcctgcatctttgtcggtgtgcgcctgagccgcggcctcgaagagcgcaaagaaattttgcagatgctcaacgacggcggctacagcgtggttgatctctccgacgacgaaatggcgaagctacacgtgcgctatatggtcggcggacgtccatcgcatccgttgcaggaacgcctctacagcttcgaattcccggaatcaccgggcgcgctgctgcgcttcctcaacacgctgggtacgtactggaacatttctttgttccactatcgcagccatggcaccgactacgggcgcgtactggcggcgttcgaacttggcgaccatgaaccggatttcgaaacccggctgaatgagctgggctacgattgccacgacgaaaccaataacccggcgttcaggttctttttggcgggttag

SEQ ID NO: 315 - DNA, 1233 bp, Escherichia coli
atggcaaaggtatcgctggagaaagacaagattaagtttctgctggtagaaggcgtgcaccaaaaggcgctggaaagccttcgtgcagctggttacaccaacatcgaatttcacaaaggcgcgctggatgatgaacaattaaaagaatccatccgcgatgcccacttcatcggcctgcgatcccgtacccatctgactgaagacgtgatcaacgccgcagaaaaactggtcgctattggctgtttctgtatcggaacaaaccaggttgatctggatgcggcggcaaagcgcgggatcccggtatttaacgcaccgttctcaaatacgcgctctgttgcggagctggtgattggcgaactgctgctgctattgcgcggcgtgccggaagccaatgctaaagcgcaccgtggcgtgtggaacaaactggcggcgggttcttttgaagcgcgcggcaaaaagctgggtatcatcggctacggtcatattggtacgcaattgggcattctggctgaatcgctgggaatgtatgtttacttttatgatattgaaaataaactgccgctgggcaacgccactcaggtacagcatctttctgacctgctgaatatgagcgatgtggtgagtctgcatgtaccagagaatccgtccaccaaaaatatgatgggcgcgaaagaaatttcactaatgaagcccggctcgctgctgattaatgcttcgcgcggtactgtggtggatattccggcgctgtgtgatgcgctggcgagcaaacatctggcgggggcggcaatcgacgtattcccgacggaaccggcgaccaatagcgatccatttacctctccgctgtgtgaattcgacaacgtccttctgacgccacacattggcggttcgactcaggaagcgcaggagaatatcggcctggaagttgcgggtaaattgatcaagtattctgacaatggctcaacgctctctgcggtgaacttcccggaagtctcgctgccactgcacggtgggcgtcgtctgatgcacatccacgaaaaccgtccgggcgtgctaactgcgctgaacaaaatcttcgccgagcagggcgtcaacatcgccgcgcaatatctgcaaacttccgcccagatgggttatgtggttattgatattgaagccgacgaagacgttgccgaaaaagcgctgcaggcaatgaaagctattccgggtaccattcgcgcccgtctgctgtactaa

SEQ ID NO: 316 - DNA, 1089 bp, Escherichia coli
atggctcaaatcttcaattttagttctggtccggcaatgctaccggcagaggtgcttaaacaggctcaacaggaactgcgcgactggaacggtcttggtacgtcggtgatggaagtgagtcaccgtggcaaagagttcattcaggttgcagaggaagccgagaaggattttcgcgatcttcttaatgtcccctccaactacaaggtattattctgccatggcggtggtcgcggtcagtttgctgcggtaccgctgaatattctcggtgataaaaccaccgcagattatgttgatgccggttactgggcggcaagtgccattaaagaagcgaaaaaatactgcacgcctaatgtctttgacgccaaagtgactgttgatggtctgcgcgcggttaagccaatgcgtgaatggcaactctctgataatgctgcttatatgcattattgcccgaatgaaaccatcgatggtatcgccatcgacgaaacgccagacttcggcgcagatgtggtggtcgccgctgacttctcttcaaccattctttcccgtccgattgacgtcagccgttatggtgtaatttacgctggcgcgcagaaaaatatcggcccggctggcctgacaatcgtcatcgttcgtgaagatttgctgggcaaagcgaatatcgcgtgtccgtcgattctggattattccatcctcaacgataacggctccatgtttaacacgccgccgacatttgcctggtatctatctggtctggtctttaaatggctgaaagcgaacggcggtgtagctgaaatggataaaatcaatcagcaaaaagcagaactgctatatggggtgattgataacagcgatttctaccgcaatgacgtggcgaaagctaaccgttcgcggatgaacgtgccgttccagttggcggacagtgcgcttgacaaattgttccttgaagagtcttttgctgctggccttcatgcactgaaaggtcaccgtgtggtcggcggaatgcgcgcttctatttataacgccatgccgctggaaggcgttaaagcgctgacagacttcatggttgagttcgaacgccgtcacggttaa

SEQ ID NO: 317 - DNA, 969 bp, Escherichia coli
atgcctaacattacctggtgcgacctgcctgaagatgtctctttatggccgggtctgcctctttcattaagtggtgatgaagtgatgccactggattaccacgcaggtcgtagcggctggctgctgtatggtcgtgggctggataaacaacgtctgacccaataccagagcaaactgggtgcggcgatggtgattgttgccgcctggtgcgtggaagattatcaggtgattcgtctggcaggttcactcaccgcacgggctacacgcctggcccacgaagcgcagctggatgtcgccccgctggggaaaatcccgcacctgcgcacgccgggtttgctggtgatggatatggactccaccgccatccagattgaatgtattgatgaaattgccaaactggccggaacgggcgagatggtggcggaagtaaccgaacgggcgatgcgcggcgaactcgattttaccgccagcctgcgcagccgtgtggcgacgctgaaaggcgctgacgccaatattctgcaacaggtgcgtgaaaatctgccgctgatgccaggcttaacgcaactggtgctcaagctggaaacgctgggctggaaagtggcgattgcctccggcggctttactttctttgctgaatacctgcgcgacaagctgcgcctgaccgccgtggtagccaatgaactggagatcatggacggtaaatttaccggcaatgtgatcggcgacatcgtagacgcgcagtacaaagcgaaaactctgactcgcctcgcgcaggagtatgaaatcccgctggcgcagaccgtggcgattggcgatggagccaatgacctgccgatgatcaaagcggcagggctggggattgcctaccatgccaagccaaaagtgaatgaaaaggcggaagtcaccatccgtcacgctgacctgatgggggtattctgcatcctctcaggcagcctgaatcagaagtaa

SEQ ID NO: 318 - DNA, 822 bp, Escherichia coli
atgtcgtgtgaagaactggaaattgtctggaacaatattaaagccgaagccagaacgctggcggactgtgagccaatgctggccagtttttaccacgcgacgctactcaagcacgaaaaccttggcagtgcactgagctacatgctggcgaacaagctgtcatcgccaattatgcctgctattgctatccgtgaagtggtggaagaagcctacgccgctgacccggaaatgatcgcctctgcggcctgtgatattcaggcggtgcgtacccgcgacccggcagtcgataaatactcaaccccgttgttatacctgaagggttttcatgccttgcaggcctatcgcatcggtcactggttgtggaatcaggggcgtcgcgcactggcaatctttctgcaaaaccaggtttctgtgacgttccaggtcgatattcacccggcagcaaaaattggtcgcggtatcatgcttgaccacgcgacaggcatcgtcgttggtgaaacggcggtgattgaaaacgacgtatcgattctgcaatctgtgacgcttggcggtacgggtaaatctggtggtgaccgtcacccgaaaattcgtgaaggtgtgatgattggcgcgggcgcgaaaatcctcggcaatattgaagttgggcgcggcgcgaagattggcgcaggttccgtggtgctgcaaccggtgccgccgcataccaccgccgctggcgttccggctcgtattgtcggtaaaccagacagcgataagccatcaatggatatggaccagcatttcaacggtattaaccatacatttgagtatggggatgggatctaa

SEQ ID NO: 319 - DNA, 1254 bp, Escherichia coli
atgttaaagcgtgaaatgaacattgccgattatgatgccgaactgtggcaggctatggagcaggaaaaagtacgtcaggaagagcacatcgaactgatcgcctccgaaaactacaccagcccgcgcgtaatgcaggcgcagggttctcagctgaccaacaaatatgctgaaggttatccgggcaaacgctactacggcggttgcgagtatgttgatatcgttgaacaactggcgatcgatcgtgcgaaagaactgttcggcgctgactacgctaacgtccagccgcactccggctcccaggctaactttgcggtctacaccgcgctgctggaaccaggtgataccgttctgggtatgaacctggcgcatggcggtcacctgactcacggttctccggttaacttctccggtaaactgtacaacatcgttccttacggtatcgatgctaccggtcatatcgactacgccgatctggaaaaacaagccaaagaacacaagccgaaaatgattatcggtggtttctctgcatattccggcgtggtggactgggcgaaaatgcgtgaaatcgctgacagcatcggtgcttacctgttcgttgatatggcgcacgttgcgggcctggttgctgctggcgtctacccgaacccggttcctcatgctcacgttgttactaccaccactcacaaaaccctggcgggtccgcgcggcggcctgatcctggcgaaaggtggtagcgaagagctgtacaaaaaactgaactctgccgttttccctggtggtcagggcggtccgttgatgcacgtaatcgccggtaaagcggttgctctgaaagaagcgatggagcctgagttcaaaacttaccagcagcaggtcgctaaaaacgctaaagcgatggtagaagtgttcctcgagcgcggctacaaagtggtttccggcggcactgataaccacctgttcctggttgatctggttgataaaaacctgaccggtaaagaagcagacgccgctctgggccgtgctaacatcaccgtcaacaaaaacagcgtaccgaacgatccgaagagcccgtttgtgacctccggtattcgtgtaggtactccggcgattacccgtcgcggctttaaagaagccgaagcgaaagaactggctggctggatgtgtgacgtgctggacagcatcaatgatgaagccgttatcgagcgcatcaaaggtaaagttctcgacatctgcgcacgttacccggtttacgcataa

SEQ ID NO: 320 - DNA, 1197 bp, Escherichia coli
atgcgtggagaattttatcagcagttaaccaacgatctggaaaccgcacgggcggaagggttgtttaaagaagagcgcattattacgtctgcgcagcaagcagatatcactgtggctgatggaagccacgtcattaacttttgtgccaacaactatctcgggctggcgaatcatcctgatctgattgcggcggcaaaggcgggaatggattctcacggtttcggcatggcttcggtgcgttttatttgcggcactcaggacagccataaagagcttgaacaaaaactggcggccttcctggggatggaagatgcgattctctactcttcctgctttgatgctaacggtggcctgtttgaaacgcttctgggtgcggaagacgccattatctccgacgcactgaaccacgcgtctattattgatggtgtgcgtctgtgcaaagctaaacgctatcgctatgccaacaacgatatgcaggagctggaagcacgtctgaaagaagcgcgtgaagccggtgcgcgtcatgtgctgatcgccaccgatggtgtgttctcaatggacggcgtgattgccaacctgaagggcgtttgcgatctggcagataaatatgatgccctggtgatggtagacgactcccacgcggtcggttttgtcggtgaaaatggtcgtggttcccatgaatactgcgatgtgatgggccgggtcgatattatcaccggtacgcttggtaaagcgctgggcggggcttctggtggttataccgcggcgcgcaaagaagtggttgagtggctgcgccagcgttctcgtccgtacctgttctccaactcgctggcaccggccattgttgccgcgtccatcaaagtactggagatggtcgaagcgggcagcgaactgcgtgaccgtctgtgggcgaacgcgcgtcagttccgtgagcaaatgtcggcggcgggctttaccctggcgggagccgatcacgccattattccggtcatgcttggtgatgcggtagtggcgcagaaatttgcccgtgagctgcaaaaagagggcatttacgttaccggtttcttctatccggtcgttccgaaaggtcaggcgcgtattcgtacccagatgtctgcggcgcatacccctgagcaaattacgcgtgcagtagaagcatttacgcgtattggtaaacaactgggcgttatcgcctga

SEQ ID NO: 321 - DNA, 1026 bp, Escherichia coli
atgaaagcgttatccaaactgaaagcggaagagggcatctggatgaccgacgttcctgtaccggaactcgggcataacgatctgctgattaaaatccgtaaaacagccatctgcgggactgacgttcacatctataactgggatgagtggtcgcaaaaaaccatcccggtgccgatggtcgtgggccatgaatatgtcggtgaagtggtaggtattggtcaggaagtgaaaggcttcaagatcggcgatcgcgtttctggcgaaggccatatcacctgtggtcattgccgcaactgtcgtggtggtcgtacccatttgtgccgcaacacgataggcgttggtgttaatcgcccgggctgctttgccgaatatctggtgatcccggcattcaacgccttcaaaatccccgacaatatttccgatgacttagccgcaatttttgatcccttcggtaacgccgtgcataccgcgctgtcgtttgatctggtgggcgaagatgtgctggtttctggtgcaggcccgattggtattatggcagcggcggtggcgaaacacgttggtgcacgcaatgtggtgatcactgatgttaacgaataccgccttgagctggcgcgtaaaatgggtatcacccgtgcggttaacgtcgccaaagaaaatctcaatgacgtgatggcggagttaggcatgaccgaaggttttgatgtcggtctggaaatgtccggtgcgccgccagcgtttcgtaccatgcttgacaccatgaatcacggcggccgtattgcgatgctgggtattccgccgtctgatatgtctatcgactggaccaaagtgatctttaaaggcttgttcattaaaggtatttacggtcgtgagatgtttgaaacctggtacaagatggcggcgctgattcagtctggcctcgatctttcgccgatcattacccatcgtttctctatcgatgatttccagaagggctttgacgctatgcgttcgggccagtccgggaaagttattctgagctgggattaa

SEQ ID NO: 322 - DNA, 264 bp, Escherichia coli
atgatgcaacatcaggtcaatgtatcggctcgcttcaatccagaaaccttagaacgtgttttacgcgtggtgcgtcatcgtggtttccacgtctgctcaatgaatatggccgccgccagcgatgcacaaaatataaatatcgaattgaccgttgccagcccacggtcggtcgacttactgtttagtcagttaaataaactggtggacgtcgcacacgttgccatctgccagagcacaaccacatcacaacaaatccgcgcctga

SEQ ID NO: 323 - DNA, 582 bp, Escherichia coli
ttgttgttaaaacaactgtcggatcgtaaacctgcggattgcgtcgtgaccacagatgtggggcagcaccagatgtgggctgcgcagcacatcgcccacactcgcccggaaaatttcatcacctccagcggtttaggtaccatgggttttggtttaccggcggcggttggcgcacaagtcgcgcgaccgaacgataccgttgtctgtatctccggtgacggctctttcatgatgaatgtgcaagagctgggcaccgtaaaacgcaagcagttaccgttgaaaatcgtcttactcgataaccaacggttagggatggttcgacaatggcagcaactgttttttcaggaacgatacagcgaaaccacccttactgataaccccgatttcctcatgttagccagcgccttcggcatccatggccaacacatcacccggaaagaccaggttgaagcggcactcgacaccatgctgaacagtgatgggccatacctgcttcatgtctcaatcgacgaacttgagaacgtctggccgctggtgccgcctggcgccagtaattcagaaatgttggagaaattatcatga

SEQ ID NO: 324 - DNA, 984 bp, Escherichia coli
atgaatggcgcacagtgggtggtacatgcgttgcgggcacagggtgtgaacaccgttttcggttatccgggtggcgcaattatgccggtttacgatgcattgtatgacggcggcgtggagcacttgctatgccgacatgagcagggtgcggcaatggcggctatcggttatgctcgtgctaccggcaaaactggcgtatgtatcgccacgtctggtccgggcgcaaccaacctgataaccgggcttgcggacgcactgttagattccatccctgttgttgccatcaccggtcaagtgtccgcaccgtttatcggcactgacgcatttcaggaagtggatgtcctgggattgtcgttagcctgtaccaagcacagctttctggtgcagtcgctggaagagttgccgcgcatcatggctgaagcattcgacgttgcctgctcaggtcgtcctggtccggttctggtcgatatcccaaaagatatccagttagccagcggtgacctggaaccgtggttcaccaccgttgaaaacgaagtgactttcccacatgccgaagttgagcaagcgcgccagatgctggcaaaagcgcaaaaaccgatgctgtacgttggcggtggcgtgggtatggcgcaggcagttccggctttgcgtgaatttctcgctgccacaaaaatgcctgccacctgtacgctgaaagggctgggcgcagtagaagcagattatccgtactatctgggcatgctggggatgcacggcaccaaagcggcaaacttcgcggtgcaggagtgtgacctgctgatcgccgtgggcgcacgttttgatgaccgggtgaccggcaaactgaacaccttcgcgccacacgccagtgttatccatatggatatcgacccggcagaaatgaacaagctgcgtcaggcacatgtggcattacaaggtgatttaaatgctctgttaccagcattacagcagccgttaaatcaatga

SEQ ID NO: 325 - DNA, 291 bp, Escherichia coli
atgcaaaacacaactcatgacaacgtaattctggagctcaccgttcgcaaccatccgggcgtaatgacccacgtttgtggcctttttgcccgccgcgcttttaacgttgaaggcattctttgtctgccgattcaggacagcgacaaaagccatatctggctactggtcaatgacgaccagcgtctggagcagatgataagccaaatcgataagctggaagatgtcgtgaaagtgcagcgtaatcagtccgatccgacgatgtttaacaagatcgcggtgttttttcagtaa

SEQ ID NO: 326 - DNA, 1689 bp, Escherichia coli
atggcaagttcgggcacaacatcgacgcgtaagcgctttaccggcgcagaatttatcgttcatttcctggaacagcagggcattaagattgtgacaggcattccgggcggttctatcctgcctgtttacgatgccttaagccaaagcacgcaaatccgccatattctggcccgtcatgaacagggcgcgggctttatcgctcagggaatggcgcgcaccgacggtaaaccggcggtctgtatggcctgtagcggaccgggtgcgactaacctggtgaccgccattgccgatgcgcggctggactccatcccgctgatttgcatcactggtcaggttcccgcctcgatgatcggcaccgacgccttccaggaagtggacacctacggcatctctatccccatcaccaaacacaactatctggtcagacatatcgaagaactcccgcaggtcatgagcgatgccttccgcattgcgcaatcaggccgcccaggcccggtgtggatagacattcctaaggatgtgcaaacggcagtttttgagattgaaacacagcccgctatggcagaaaaagccgccgcccccgcctttagcgaagaaagcattcgtgacgcagcggcgatgattaacgctgccaaacgcccggtgctttatctgggcggcggtgtgatcaatgcgcccgcacgggtgcgtgaactggcggagaaagcgcaactgcctaccaccatgactttaatggcgctgggcatgttgccaaaagcgcatccgttgtcgctgggtatgctggggatgcacggcgtgcgcagcaccaactatattttgcaggaggcggatttgttgatagtgctcggtgcgcgttttgatgaccgggcgattggcaaaaccgagcagttctgtccgaatgccaaaatcattcatgtcgatatcgaccgtgcagagctgggtaaaatcaagcagccgcacgtggcgattcaggcggatgttgatgacgtgctggcgcagttgatcccgctggtggaagcgcaaccgcgtgcagagtggcaccagttggtagcggatttgcagcgtgagtttccgtgtccaatcccgaaagcgtgcgatccgttaagccattacggcctgatcaacgccgttgccgcctgtgtcgatgacaatgcaattatcaccaccgacgttggtcagcatcagatgtggaccgcgcaagcttatccgctcaatcgcccacgccagtggctgacctccggtgggctgggcacgatgggttttggcctgcctgcggcgattggcgctgcgctggcgaacccggatcgcaaagtgttgtgtttctccggcgacggcagcctgatgatgaatattcaggagatggcgaccgccagtgaaaatcagctggatgtcaaaatcattctgatgaacaacgaagcgctggggctggtgcatcagcaacagagtctgttctacgagcaaggcgtttttgccgccacctatccgggcaaaatcaactttatgcagattgccgccggattcggcctcgaaacctgtgatttgaataacgaagccgatccgcaggcttcattgcaggaaatcatcaatcgccctggcccggcgctgatccatgtgcgcattgatgccgaagaaaaagtttacccgatggtgccgccaggtgcggcgaatactgaaatggtgggggaataa

SEQ ID NO: 327 - DNA, 492 bp, Escherichia coli
atgcgccggatattatcagtcttactcgaaaatgaatcaggcgcgttatcccgcgtgattggccttttttcccagcgtggctacaacattgaaagcctgaccgttgcgccaaccgacgatccgacattatcgcgtatgaccatccagaccgtgggcgatgaaaaagtacttgagcagatcgaaaagcaattacacaaactggtcgatgtcttgcgcgtgagtgagttggggcagggcgcgcatgttgagcgggaaatcatgctggtgaaaattcaggccagcggttacgggcgtgacgaagtgaaacgtaatacggaaatattccgtgggcaaattatcgatgtcacaccctcgctttataccgttcaattagcaggcaccagcggtaagcttgatgcatttttagcatcgattcgcgatgtggcgaaaattgtggaggttgctcgctctggtgtggtcggactttcgcgcggcgataaaataatgcgttga

SEQ ID NO: 328 - DNA, 99 bp, Escherichia coli
atgacagcccttctacgagtgattagcctggtcgtgattagcgtggtggtgattattatcccaccgtgcggggctgcacttggacgaggaaaggcttag

SEQ ID NO: 329 - DNA, 1476 bp, Escherichia coli
atggctaactacttcaatacactgaatctgcgccagcagctggcacagctgggcaaatgtcgctttatgggccgcgatgaattcgccgatggcgcgagctaccttcagggtaaaaaagtagtcatcgtcggctgtggcgcacagggtctgaaccagggcctgaacatgcgtgattctggtctcgatatctcctacgctctgcgtaaagaagcgattgccgagaagcgcgcgtcctggcgtaaagcgaccgaaaatggttttaaagtgggtacttacgaagaactgatcccacaggcggatctggtgattaacctgacgccggacaagcagcactctgatgtagtgcgcaccgtacagccactgatgaaagacggcgcggcgctgggctactcgcacggtttcaacatcgtcgaagtgggcgagcagatccgtaaagatatcaccgtagtgatggttgcgccgaaatgcccaggcaccgaagtgcgtgaagagtacaaacgtgggttcggcgtaccgacgctgattgccgttcacccggaaaacgatccgaaaggcgaaggcatggcgattgccaaagcctgggcggctgcaaccggtggtcaccgtgcgggtgtgctggaatcgtccttcgttgcggaagtgaaatctgacctgatgggcgagcaaaccatcctgtgcggtatgttgcaggctggctctctgctgtgcttcgacaagctggtggaagaaggtaccgatccagcatacgcagaaaaactgattcagttcggttgggaaaccatcaccgaagcactgaaacagggcggcatcaccctgatgatggaccgtctctctaacccggcgaaactgcgtgcttatgcgctttctgaacagctgaaagagatcatggcacccctgttccagaaacatatggacgacatcatctccggcgaattctcttccggtatgatggcggactgggccaacgatgataagaaactgctgacctggcgtgaagagaccggcaaaaccgcgtttgaaaccgcgccgcagtatgaaggcaaaatcggcgagcaggagtacttcgataaaggcgtactgatgattgcgatggtgaaagcgggcgttgaactggcgttcgaaaccatggtcgattccggcatcattgaagagtctgcatattatgaatcactgcacgagctgccgctgattgccaacaccatcgcccgtaagcgtctgtacgaaatgaacgtggttatctctgataccgctgagtacggtaactatctgttctcttacgcttgtgtgccgttgctgaaaccgtttatggcagagctgcaaccgggcgacctgggtaaagctattccggaaggcgcggtagataacgggcaactgcgtgatgtgaacgaagcgattcgcagccatgcgattgagcaggtaggtaagaaactgcgcggctatatgacagatatgaaacgtattgctgttgcgggttaa

SEQ ID NO: 330 - DNA, 1851 bp, Escherichia coli
atgcctaagtaccgttccgccaccaccactcatggtcgtaatatggcgggtgctcgtgcgctgtggcgcgccaccggaatgaccgacgccgatttcggtaagccgattatcgcggttgtgaactcgttcacccaatttgtaccgggtcacgtccatctgcgcgatctcggtaaactggtcgccgaacaaattgaagcggctggcggcgttgccaaagagttcaacaccattgcggtggatgatgggattgccatgggccacggggggatgctttattcactgccatctcgcgaactgatcgctgattccgttgagtatatggtcaacgcccactgcgccgacgccatggtctgcatctctaactgcgacaaaatcaccccggggatgctgatggcttccctgcgcctgaatattccggtgatctttgtttccggcggcccgatggaggccgggaaaaccaaactttccgatcagatcatcaagctcgatctggttgatgcgatgatccagggcgcagacccgaaagtatctgactcccagagcgatcaggttgaacgttccgcgtgtccgacctgcggttcctgctccgggatgtttaccgctaactcaatgaactgcctgaccgaagcgctgggcctgtcgcagccgggcaacggctcgctgctggcaacccacgccgaccgtaagcagctgttccttaatgctggtaaacgcattgttgaattgaccaaacgttattacgagcaaaacgacgaaagtgcactgccgcgtaatatcgccagtaaggcggcgtttgaaaacgccatgacgctggatatcgcgatgggtggatcgactaacaccgtacttcacctgctggcggcggcgcaggaagcggaaatcgacttcaccatgagtgatatcgataagctttcccgcaaggttccacagctgtgtaaagttgcgccgagcacccagaaataccatatggaagatgttcaccgtgctggtggtgttatcggtattctcggcgaactggatcgcgcggggttactgaaccgtgatgtgaaaaacgtacttggcctgacgttgccgcaaacgctggaacaatacgacgttatgctgacccaggatgacgcggtaaaaaatatgttccgcgcaggtcctgcaggcattcgtaccacacaggcattctcgcaagattgccgttgggatacgctggacgacgatcgcgccaatggctgtatccgctcgctggaacacgcctacagcaaagacggcggcctggcggtgctctacggtaactttgcggaaaacggctgcatcgtgaaaacggcaggcgtcgatgacagcatcctcaaattcaccggcccggcgaaagtgtacgaaagccaggacgatgcggtagaagcgattctcggcggtaaagttgtcgccggagatgtggtagtaattcgctatgaaggcccgaaaggcggtccggggatgcaggaaatgctctacccaaccagcttcctgaaatcaatgggtctcggcaaagcctgtgcgctgatcaccgacggtcgtttctctggtggcacctctggtctttccatcggccacgtctcaccggaagcggcaagcggcggcagcattggcctgattgaagatggtgacctgatcgctatcgacatcccgaaccgtggcattcagttacaggtaagcgatgccgaactggcggcgcgtcgtgaagcgcaggacgctcgaggtgacaaagcctggacgccgaaaaatcgtgaacgtcaggtctcctttgccctgcgtgcttatgccagcctggcaaccagcgccgacaaaggcgcggtgcgcgataaatcgaaactggggggttaa

SEQ ID NO: 331 - DNA, 930 bp, Escherichia coli
atgaccacgaagaaagctgattacatttggttcaatggggagatggttcgctgggaagacgcgaaggtgcatgtgatgtcgcacgcgctgcactatggcacttcggtttttgaaggcatccgttgctacgactcgcacaaaggaccggttgtattccgccatcgtgagcatatgcagcgtctgcatgactccgccaaaatctatcgcttcccggtttcgcagagcattgatgagctgatggaagcttgtcgtgacgtgatccgcaaaaacaatctcaccagcgcctatatccgtccgctgatcttcgtcggtgatgttggcatgggagtaaacccgccagcgggatactcaaccgacgtgattatcgctgctttcccgtggggagcgtatctgggcgcagaagcgctggagcaggggatcgatgcgatggtttcctcctggaaccgcgcagcaccaaacaccatcccgacggcggcaaaagccggtggtaactacctctcttccctgctggtgggtagcgaagcgcgccgccacggttatcaggaaggtatcgcgctggatgtgaacggttatatctctgaaggcgcaggcgaaaacctgtttgaagtgaaagatggtgtgctgttcaccccaccgttcacctcctccgcgctgccgggtattacccgtgatgccatcatcaaactggcgaaagagctgggaattgaagtacgtgagcaggtgctgtcgcgcgaatccctgtacctggcggatgaagtgtttatgtccggtacggcggcagaaatcacgccagtgcgcagcgtagacggtattcaggttggcgaaggccgttgtggcccggttaccaaacgcattcagcaagccttcttcggcctcttcactggcgaaaccgaagataaatggggctggttagatcaagttaatcaataa

SEQ ID NO: 332 - DNA, 1344 bp, Escherichia coli
atggatcagacatattctctggagtcattcctcaaccatgtccaaaagcgcgacccgaatcaaaccgagttcgcgcaagccgttcgtgaagtaatgaccacactctggccttttcttgaacaaaatccaaaatatcgccagatgtcattactggagcgtctggttgaaccggagcgcgtgatccagtttcgcgtggtatgggttgatgatcgcaaccagatacaggtcaaccgtgcatggcgtgtgcagttcagctctgccatcggcccgtacaaaggcggtatgcgcttccatccgtcagttaacctttccattctcaaattcctcggctttgaacaaaccttcaaaaatgccctgactactctgccgatgggcggtggtaaaggcggcagcgatttcgatccgaaaggaaaaagcgaaggtgaagtgatgcgtttttgccaggcgctgatgactgaactgtatcgccacctgggcgcggataccgacgttccggcaggtgatatcggggttggtggtcgtgaagtcggctttatggcggggatgatgaaaaagctctccaacaataccgcctgcgtcttcaccggtaagggcctttcatttggcggcagtcttattcgcccggaagctaccggctacggtctggtttatttcacagaagcaatgctaaaacgccacggtatgggttttgaagggatgcgcgtttccgtttctggctccggcaacgtcgcccagtacgctatcgaaaaagcgatggaatttggtgctcgtgtgatcactgcgtcagactccagcggcactgtagttgatgaaagcggattcacgaaagagaaactggcacgtcttatcgaaatcaaagccagccgcgatggtcgagtggcagattacgccaaagaatttggtctggtctatctcgaaggccaacagccgtggtctctaccggttgatatcgccctgccttgcgccacccagaatgaactggatgttgacgccgcgcatcagcttatcgctaatggcgttaaagccgtcgccgaaggggcaaatatgccgaccaccatcgaagcgactgaactgttccagcaggcaggcgtactatttgcaccgggtaaagcggctaatgctggtggcgtcgctacatcgggcctggaaatggcacaaaacgctgcgcgcctgggctggaaagccgagaaagttgacgcacgtttgcatcacatcatgctggatatccaccatgcctgtgttgagcatggtggtgaaggtgagcaaaccaactacgtgcagggcgcgaacattgccggttttgtgaaggttgccgatgcgatgctggcgcagggtgtgatttaa

SEQ ID NO: 333 - DNA, 1410 bp, Escherichia coli
atgtccgctgaacacgtactgacgatgctgaacgagcacgaagtgaagtttgttgatttgcgcttcaccgatactaaaggtaaagaacagcacgtcactatccctgctcatcaggtgaatgctgaattcttcgaagaaggcaaaatgtttgacggctcctcgattggcggctggaaaggcattaacgagtccgacatggtgctgatgccagacgcatccaccgcagtgattgacccgttcttcgccgactccaccctgattatccgttgcgacatccttgaacctggcaccctgcaaggctatgaccgtgacccgcgctccattgcgaagcgcgccgaagattacctgcgttccactggcattgccgacaccgtactgttcgggccagaacctgaattcttcctgttcgatgacatccgtttcggatcatctatctccggttcccacgttgctatcgacgatatcgaaggcgcatggaactcctccacccaatacgaaggtggtaacaaaggtcaccgtccggcagtgaaaggcggttacttcccggttccaccggtagactcggctcaggatattcgttctgaaatgtgtctggtgatggaacagatgggtctggtggttgaagcccatcaccacgaagtagcgactgctggtcagaacgaagtggctacccgcttcaataccatgaccaaaaaagctgacgaaattcagatctacaaatatgttgtgcacaacgtagcgcaccgcttcggtaaaaccgcgacctttatgccaaaaccgatgttcggtgataacggctccggtatgcactgccacatgtctctgtctaaaaacggcgttaacctgttcgcaggcgacaaatacgcaggtctgtctgagcaggcgctgtactacattggcggcgtaatcaaacacgctaaagcgattaacgccctggcaaacccgaccaccaactcttataagcgtctggtcccgggctatgaagcaccggtaatgctggcttactctgcgcgtaaccgttctgcgtctatccgtattccggtggtttcttctccgaaagcacgtcgtatcgaagtacgtttcccggatccggcagctaacccgtacctgtgctttgctgccctgctgatggccggtcttgatggtatcaagaacaagatccatccgggcgaagccatggacaaaaacctgtatgacctgccgccagaagaagcgaaagagatcccacaggttgcaggctctctggaagaagcactgaacgaactggatctggaccgcgagttcctgaaagccggtggcgtgttcactgacgaagcaattgatgcgtacatcgctctgcgtcgcgaagaagatgaccgcgtgcgtatgactccgcatccggtagagtttgagctgtactacagcgtctaa

SEQ ID NO: 334 - DNA, 1149 bp, Escherichia coli
ttgattaagtcagcgctattggttctggaagacggaacccagtttcacggtcgggccataggggcaacaggttcggcggttggggaagtcgttttcaatacttcaatgaccggttatcaagaaatcctcactgatccttcctattctcgtcaaatcgttactcttacttatccccatattggcaatgtcggcaccaatgacgccgatgaagaatcttctcaggtacatgcacaaggtctggtgattcgcgacctgccgctgattgccagcaacttccgtaataccgaagacctctcttcttacctgaaacgccataacatcgtggcgattgccgatatcgatacccgtaagctgacgcgtttactgcgcgagaaaggcgcacagaatggctgcattatcgcgggcgataacccggatgcggcgctggcgttagaaaaagcccgcgcgttcccaggtctgaatggcatggatctggcaaaagaagtgaccaccgcagaagcctatagctggacacaagggagctggacgttgaccggtggcctgccagaagcgaaaaaagaagacgagctgccgttccacgtcgtggcttatgattttggtgccaagcgcaacatcctgcggatgctggtggatagaggctgtcgcctgaccatcgttccggcgcaaacttctgcggaagatgtgctgaaaatgaatccagacggcatcttcctctccaacggtcctggcgacccggccccgtgcgattacgccattaccgccatccagaaattcctcgaaaccgatattccggtattcggcatctgtctcggtcatcagctgctggcgctggcgagcggtgcgaagactgtcaaaatgaaatttggtcaccacggcggcaaccatccggttaaagatgtggagaaaaacgtggtaatgatcaccgcccagaaccacggttttgcggtggacgaagcaacattacctgcaaacctgcgtgtcacgcataaatccctgttcgacggtacgttacagggcattcatcgcaccgataaaccggcattcagcttccaggggcaccctgaagccagccctggtccacacgacgccgcgccgttgttcgaccactttatcgagttaattgagcagtaccgtaaaaccgctaagtaa

SEQ ID NO: 335 - DNA, 3222 bp, Escherichia coli
atgccaaaacgtacagatataaaaagtatcctgattctgggtgcgggcccgattgttatcggtcaggcgtgtgagtttgactactctggcgcgcaagcgtgtaaagccctgcgtgaagagggttaccgcgtcattctggtgaactccaacccggcgaccatcatgaccgacccggaaatggctgatgcaacctacatcgagccgattcactgggaagttgtacgcaagattattgaaaaagagcgcccggacgcggtgctgccaacgatgggcggtcagacggcgctgaactgcgcgctggagctggaacgtcagggcgtgttggaagagttcggtgtcaccatgattggtgccactgccgatgcgattgataaagcagaagaccgccgtcgtttcgacgtagcgatgaagaaaattggtctggaaaccgcgcgttccggtatcgcacacacgatggaagaagcgctggcggttgccgctgacgtgggcttcccgtgcattattcgcccatcctttaccatgggcggtagcggcggcggtatcgcttataaccgtgaagagtttgaagaaatttgcgcccgcggtctggatctctctccgaccaaagagttgctgattgatgagtcgctgatcggctggaaagagtacgagatggaagtggtgcgtgataaaaacgacaactgcatcatcgtctgctctatcgaaaacttcgatgcgatgggcatccacaccggtgactccatcactgtcgcgccagcccaaacgctgaccgacaaagaatatcaaatcatgcgtaacgcctcgatggcggtgctgcgtgaaatcggcgttgaaaccggtggttccaacgttcagtttgcggtgaacccgaaaaacggtcgtctgattgttatcgaaatgaacccacgcgtgtcccgttcttcggcgctggcgtcgaaagcgaccggtttcccgattgctaaagtggcggcgaaactggcggtgggttacaccctcgacgaactgatgaacgacatcactggcggacgtactccggcctccttcgagccgtccatcgactatgtggttactaaaattcctcgcttcaacttcgaaaaattcgccggtgctaacgaccgtctgaccactcagatgaaatcggttggcgaagtgatggcgattggtcgcacgcagcaggaatccctgcaaaaagcgctgcgcggcctggaagtcggtgcgactggattcgacccgaaagtgagcctggatgacccggaagcgttaaccaaaatccgtcgcgaactgaaagacgcaggcgcagatcgtatctggtacatcgccgatgcgttccgtgcgggcctgtctgtggacggcgtcttcaacctgaccaacattgaccgctggttcctggtacagattgaagagctggtgcgtctggaagagaaagtggcggaagtgggcatcactggcctgaacgctgacttcctgcgccagctgaaacgcaaaggctttgccgatgcgcgcttggcaaaactggcgggcgtacgcgaagcggaaatccgtaagctgcgtgaccagtatgacctgcacccggtttataagcgcgtggatacctgtgcggcagagttcgccaccgacaccgcttacatgtactccacttatgaagaagagtgcgaagcgaatccgtctaccgaccgtgaaaaaatcatggtgcttggcggcggcccgaaccgtatcggtcagggtatcgaattcgactactgttgcgtacacgcctcgctggcgctgcgcgaagacggttacgaaaccattatggttaactgtaacccggaaaccgtctccaccgactacgacacttccgaccgcctctacttcgagccggtaactctggaagatgtgctggaaatcgtgcgtatcgagaagccgaaaggcgttatcgtccagtacggcggtcagaccccgctgaaactggcgcgcgcgctggaagctgctggcgtaccggttatcggcaccagcccggatgctatcgaccgtgcagaagaccgtgaacgcttccagcatgcggttgagcgtctgaaactgaaacaaccggcgaacgccaccgttaccgctattgaaatggcggtagagaaggcgaaagagattggctacccgctggtggtacgtccgtcttacgttctcggcggtcgggcgatggaaatcgtctatgacgaagctgacctgcgtcgctacttccagacggcggtcagcgtgtctaacgatgcgccagtgttgctggaccacttcctcgatgacgcggtagaagttgacgtggatgccatctgcgacggcgaaatggtgctgattggcggcatcatggagcatattgagcaggcgggcgtgcactccggtgactccgcatgttctctgccagcctacaccttaagtcaggaaattcaggatgtgatgcgccagcaggtgcagaaactggccttcgaattgcaggtgcgcggcctgatgaacgtgcagtttgcggtgaaaaacaacgaagtctacctgattgaagttaacccgcgtgcggcgcgtaccgttccgttcgtctccaaagccaccggcgtaccgctggcaaaagtggcggcgcgcgtgatggctggcaaatcgctggctgagcagggcgtaaccaaagaagttatcccgccgtactactcggtgaaagaagtggtgctgccgttcaataaattcccgggcgttgacccgctgttagggccagaaatgcgctctaccggggaagtcatgggcgtgggccgcaccttcgctgaagcgtttgccaaagcgcagctgggcagcaactccaccatgaagaaacacggtcgtgcgctgctttccgtgcgcgaaggcgataaagaacgcgtggtggacctggcggcaaaactgctgaaacagggcttcgagctggatgcgacccacggcacggcgattgtgctgggcgaagcaggtatcaacccgcgtctggtaaacaaggtgcatgaaggccgtccgcacattcaggaccgtatcaagaatggcgaatatacctacatcatcaacaccacctcaggccgtcgtgcgattgaagactcccgcgtgattcgtcgcagtgcgctgcaatataaagtgcattacgacaccaccctgaacggcggctttgccaccgcgatggcgctgaatgccgatgcgactgaaaaagtaatttcggtgcaggaaatgcacgcacagatcaaataa

SEQ ID NO: 336 - DNA, 471 bp, Escherichia coli
atgattcagtcacaaattaaccgcaatattcgtcttgatcttgccgatgccattttgctcagcaaagctaaaaaagatctctcatttgccgagattgccgacggcaccggtctggcagaagcctttgtaaccgcggctttgctgggtcagcaggcgcttcctgccgacgccgcccgcctggtcggggcgaagctggatctcgacgaagactccattctactgttgcagatgattccactgcgtggctgcattgatgaccgtattccaactgacccaacgatgtatcgtttctatgaaatgttgcaggtgtacggtacaaccctgaaagcgttggttcatgagaaatttggcgatggcattattagcgcgattaacttcaaactcgacgttaagaaagtggcggacccggaaggtggcgaacgtgcggtcatcaccttagatggtaaatatctgccgaccaaaccgttctga

SEQ ID NO: 337 - DNA, 660 bp, Escherichia coli
gtgaaagagattattgatggattccttaaattccagcgcgaggcatttccgaagcgggaagccttgtttaaacagctggcgacacagcaaagcccgcgcacactttttatctcctgctccgacagccgtctggtccctgagctggtgacgcaacgtgagcctggcgatctgttcgttattcgcaacgcgggcaatatcgtcccttcctacgggccggaacccggtggcgtttctgcttcggtggagtatgccgtcgctgcgcttcgggtatctgacattgtgatttgtggtcattccaactgtggcgcgatgaccgccattgccagctgtcagtgcatggaccatatgcctgccgtctcccactggctgcgttatgccgattcagcccgcgtcgttaatgaggcgcgcccgcattccgatttaccgtcaaaagctgcggcgatggtacgtgaaaacgtcattgctcagttggctaatttgcaaactcatccatcggtgcgcctggcgctcgaagaggggcggatcgccctgcacggctgggtctacgacattgaaagcggcagcatcgcagcttttgacggcgcaacccgccagtttgtgccactggccgctaatcctcgcgtttgtgccataccgctacgccaaccgaccgcagcgtaa

SEQ ID NO: 338 - DNA, 1332 bp, Escherichia coli
gtggtaaaggaacgtaaaaccgagttggtcgagggattccgccattcggttccctatatcaatacccaccggggaaaaacgtttgtcatcatgctcggcggtgaagccattgagcatgagaatttctccagtatcgttaatgatatcgggttgttgcacagcctcggcatccgtctggtggtggtctatggcgcacgtccgcagatcgacgcaaatctggctgcgcatcaccacgaaccgctgtatcacaagaatatacgtgtgaccgacgccaaaacactggaactggtgaagcaggctgcgggaacattgcaactggatattactgctcgcctgtcgatgagtctcaataacacgccgctgcagggcgcgcatatcaacgtcgtcagtggcaattttattattgcccagccgctgggcgtcgatgacggcgtggattactgccatagcgggcgtatccggcggattgatgaagacgcgatccatcgtcaactggacagcggtgcaatagtgctaatggggccggtcgctgtttcagtcactggcgagagctttaacctgacctcggaagagattgccactcaactggccatcaaactgaaagctgaaaagatgattggtttttgctcttcccagggcgtcactaatgacgacggtgatattgtctccgaacttttccctaacgaagcgcaagcgcgggtagaagcccaggaagagaaaggcgattacaactccggtacggtgcgctttttgcgtggcgcagtgaaagcctgccgcagcggcgtgcgtcgctgtcatttaatcagttatcaggaagatggcgcgctgttgcaagagttgttctcacgcgacggtatcggtacgcagattgtgatggaaagcgccgagcagattcgtcgcgcaacaatcaacgatattggcggtattctggagttgattcgcccactggagcagcaaggtattctggtacgccgttctcgcgagcagctggagatggaaatcgacaaattcaccattattcagcgcgataacacgactattgcctgcgccgcgctctatccgttcccggaagagaagattggggaaatggcctgtgtggcagttcacccggattaccgcagttcatcaaggggtgaagttctgctggaacgcattgccgctcaggcgaagcagagcggcttaagcaaattgtttgtgctgaccacgcgcagtattcactggttccaggaacgtggatttaccccagtggatattgatttactgcccgagagcaaaaagcagttgtacaactaccagcgtaaatccaaagtgttgatggcggatttagggtaa

SEQ ID NO: 339 - DNA, 777 bp, Escherichia coli
atgatgaatccattaattatcaaactgggcggcgtactgctggatagtgaagaggcgctggaacgtctgtttagcgcactggtgaattatcgtgagtcacatcagcgtccgctggtgattgtgcacggcggcggttgcgtggtggatgagctgatgaaagggctgaatctgccggtgaaaaagaaaaacggcctgcgggtgacgcctgctgatcagatagacattatcaccggagcactggcgggaacggcaaataaaaccctgttggcatgggcgaagaaacatcagattgcggccgtaggtttgtttctcggtgacggcgacagcgtcaaagtgacccagcttgatgaagagttaggtcatgttggactggcgcagccaggttcgcctaagcttatcaactccttgctggagaacggttatctgccggtggtcagctccattggcgtaacagacgaagggcaactgatgaacgtcaatgccgaccaggcggcaacggcgctggcggcaacgctgggcgcggatctgattttgctctccgacgtcagcggcattctcgacggcaaagggcaacgcattgccgaaatgaccgccgcgaaagcagaacaactgattgagcagggcattattactgacggcatgatagtgaaagtgaacgcggcgctggatgcggcccgcacgctgggccgtccggtagatatcgcctcctggcgtcatgcggagcagcttccggcactgtttaacggtatgccgatgggtacgcggattttagcttaa

SEQ ID NO: 340 - DNA, 1005 bp, Escherichia coli
atgttgaatacgctgattgtgggtgccagcggctacgctggcgcagagctagtgacctatgtaaatcgccatccgcatatgaacataaccgctttgactgtttcagcgcaaagcaatgatgcgggaaagttaatctccgatttgcatccgcagctaaaaggcatcgttgatctgccgttgcagccgatgtcggatatcagcgagtttagcccaggggtggacgtagtgtttctcgccaccgcccatgaagttagccacgatttagcgccgcagtttcttgaagcgggctgcgtggtgttcgacctttccggcgcgtttcgtgttaacgacgccaccttctatgaaaaatattacggctttacccatcaatacccggaactgttggaacaggcagcctacggtctggcggagtggtgcggtaataaattaaaagaagcgaatttgattgcggtgccgggctgttatccgacggcggcacagctggcgctgaaaccgttgattgatgccgatcttcttgacctcaatcagtggccggtgatcaacgccaccagcggcgtgagcggtgcagggcgtaaagcggccatttcaaacagcttttgtgaagttagcctgcaaccgtatggcgtctttactcatcgccatcaaccagagatcgccacacacctcggtgctgacgttatcttcaccccacatctgggcaatttcccgcgcggcattctcgaaaccattacctgccgcctgaaatcgggtgtgacccaggcgcaagtcgcgcaagtgttacagcaggcgtatgcccataaaccgctggtgcggctgtatgacaaaggcgttccggcgctgaaaaatgtcgttgggctgccattttgcgatatcgggtttgccgttcagggcgagcatctgattattgtggcgaccgaagacaacttactgaaaggcgcggcggcacaagcggtacagtgcgccaatattcgtttcggctatgcggaaacgcagtctcttatttaa

SEQ ID NO: 341 - DNA, 1221 bp, Escherichia coli
atgtctcagccaattacgcgtgaaaactttgatgaatggatgatacctgtttacgctccggcaccctttataccggtacgtggcgaaggttcgcgcttgtgggatcagcaggggaaagagtatatcgacttcgcgggtggcattgcggtgaacgcgctgggccatgcgcatccggaactgcgtgaagcgctgaacgaacaggcgagtaagttctggcataccggcaacggttacaccaacgagccggtactgcgactggcgaaaaaattgatcgacgccacgtttgccgatcgcgtcttcttttgtaactccggtgcggaagccaacgaagcggcgctaaaactggcgcgtaaattcgctcacgaccgctacggcagccataagagcggcatcgtggcgttcaaaaatgcgtttcatggtcgcacgctgtttactgtcagtgcgggtgggcagccagcctattcacaggattttgcgccactgccggcggatattcgtcatgctgcatataacgatattaactctgccagcgcgctgattgacgactctacctgtgcggtgattgtcgaacccatccagggggaaggcggtgtggtgccagccagcaacgcgtttttacaaggtctgcgtgaattgtgtaaccgccacaatgcgctgttgatttttgatgaagtacaaaccggcgtcgggcgcaccggggaactgtatgcctatatgcactacggcgtgacgcctgatctgttaactaccgccaaagcgctgggcggcggtttcccggtcggtgcgttgttggcaaccgaagagtgcgcccgcgtgatgaccgttggcactcatggcaccacctatggcggtaatccgctggcctcggcggtggcaggcaaagtgctggagctcatcaacacaccagagatgcttaatggcgttaaacagcgtcacgactggtttgttgagcgtcttaatactattaatcaccgctatggtttgttcagtgaagttcgcggcttaggtttgctgattggctgtgtactgaatgccgattacgccgggcaagcgaaacagatctctcaggaagcggcgaaagcaggcgtgatggtactgattgcgggtggcaacgtggtgcgttttgcgcctgcgctcaatgtcagcgaagaagaggtgacgaccggactggatcgctttgcagctgcttgcgaacactttgttagccgaggttcatcatga

SEQ ID NO: 342 - DNA, 1221 bp, Escherichia coli
atggcaattgaacaaacagcaattacacgcgcgactttcgatgaagtgatcctgccgatttatgctccggcagagtttattccggtaaaaggtcagggcagccgaatctgggatcagcaaggcaaggagtatgtcgatttcgcgggtggcattgcagttacggcgttgggccattgccatcctgcgctggtgaacgcgttaaaaacccagggcgaaactctgtggcatatcagtaacgttttcaccaatgaaccggcgctgcgtcttgggcgtaaactgattgaggcaacgtttgccgaacgcgtggtgtttatgaactccggcacggaagctaacgaaaccgcctttaaactggcacgccattacgcctgtgtgcgtcatagcccgttcaaaaccaaaattattgccttccataacgcttttcatggtcgctcgctgtttaccgtttcggtgggtgggcagccaaaatattccgacggctttgggccgaaaccggcagacatcatccacgttccctttaacgatctccatgcagtgaaagcggtgatggatgatcacacctgtgcggtggtggttgagccgatccagggcgagggcggtgtgacggcagcgacgccagagtttttgcagggcttgcgcgagctgtgcgatcaacatcaggcattattggtgtttgatgaagtgcagtgcgggatggggcggaccggcgatttgtttgcttacatgcactacggcgttacgccggatattctgacctctgcgaaagcgttaggcggcggcttcccgattagcgccatgctgaccacggcggaaattgcttctgcgtttcatcctggttctcacggttccacctacggcggtaatcctctggcctgtgcagtagcgggggcggcgtttgatatcatcaatacccctgaagtgctggaaggcattcaggcgaaacgccagcgttttgttgaccatctgcagaagatcgatcagcagtacgatgtatttagcgatattcgcggtatggggctgttgattggcgcagagctgaaaccacagtacaaaggtcgggcgcgtgatttcctgtatgcgggcgcagaggctggcgtaatggtgctgaatgccggaccggatgtgatgcgttttgcaccgtcgctggtggtggaagatgcggatatcgatgaagggatgcaacgtttcgcccacgcggtggcgaaggtggttggggcgtaa

SEQ ID NO: 343 - DNA, 1152 bp, Escherichia coli
atgaaaaacaaattaccgccatttatcgagatttaccgcgctctgattgccacaccttcaataagcgccacggaagaggcactcgatcaaagcaatgcagatttaatcactctgctggcggactggtttaaagatttgggcttcaatgtggaagtgcagcctgttccaggaactcgcaacaaattcaatatgctggcaagtatcggacagggggctggcggcttgttgctggcggggcataccgatacggtgccatttgatgacggtcgctggacgcgcgatccgtttacactgacggagcatgacggcaagctttacggcttaggcaccgccgacatgaaaggcttttttgcgtttatccttgatgcgctacgcgatgtcgacgtcacgaaactgaaaaaaccgctctacattctggcgactgctgatgaagaaaccagtatggccggagcgcgttattttgccgaaactaccgccctgcgcccggattgcgccatcattggcgaaccgacgtcactacaaccggtacgcgcacataaaggtcatatctctaacgccatccgtattcagggccagtcggggcactccagcgatccagcacgcggagttaacgctatcgaactaatgcacgacgccatcgggcatattttgcaattgcgcgataacctgaaagaacgttatcactacgaagcgtttaccgtgccataccctacgctcaacctcgggcatattcacggtggcgacgcttctaaccgtatttgcgcttgctgtgagttgcatatggatattcgtccgctgcctggcatgacactcaatgaacttaatggtttgctcaacgatgcattggctccggtgagcgaacgctggccgggtcgtctgacggtcgacgagctgcatccgccgatccctggctatgaatgcccaccgaatcatcaactggttgaagtggttgagaaattgctcggagcaaaaaccgaagtggtgaactactgtaccgaagcgccgtttattcaaacgttatgcccgacgctggtgttggggcctggctcaattaatcaggctcatcaacctgatgaatatctggaaacacggtttatcaagcccacccgcgaactgataacccaggtaattcaccatttttgctggcattaa

SEQ ID NO: 344 - DNA, 1005 bp, Escherichia coli
atgtccgatttatacaaaaaacactttctgaaactgctcgactttacccctgcacagttcacttctctgctgacccttgccgcacagctcaaagccgataaaaaaaatggcaaggaagtacagaagcttaccggtaaaaacatcgcgctcatcttcgaaaaagactcgactcgtacccgttgctctttcgaagttgccgcatttgaccagggcgcgcgcgttacctatttagggccgagcggcagccagattgggcataaagagtcaattaaggacaccgcgcgggttctcgggcggatgtatgacggcattcagtatcgcggtcacggccaggaagtggtcgaaacgctggcgcagtatgcgggcgtgccggtgtggaacgggctgaccaacgagttccacccgacccagctgctggcggacctgatgaccatgcaggagcacctgccgggcaaggcgtttaacgagatgacgctggtctacgcgggcgatgcgcgcaacaacatgggcaactcgatgctggaagcggcggcgctgaccgggctggatctgcgcctgttggccccgaaagcctgctggccggaagagagcctggtggcggagtgcagcgcgctggcggagaagcacggcgggaaaattactctgacggaagacgtggcggcaggcgttaagggcgcggactttatctataccgacgtgtgggtgtcgatgggcgaggccaaagagaagtgggcagagcggattgcgctgctgcgcgggtatcaggtgaacgcgcagatgatggcgctgaccgacaacccgaacgtgaagttcctgcactgtctgccggcgttccatgacgaccagactacgctcggcaagcagatggcgaaggagttcgatctgcacggcgggatggaggtgacggacgaggtgtttgagtcggcggcgagcatcgtgttcgaccaggcggaaaaccggatgcatacgattaaggcggtgatgatggcaacgcttggggagtga

SEQ ID NO: 345 - DNA, 1005 bp, Escherichia coli
atgtccgggttttatcataagcatttcctgaaattactcgatttcacgccagctgaactcaacagcctgctgcagttagccgcgaagctgaaagccgataagaaaagcggtaaagaagaagccaaactcactggtaaaaacatcgcgctcatcttcgaaaaagactcgactcgtacccgatgctctttcgaagttgccgcatatgaccagggtgctcgcgttacttatctcggcccaagcggcagccagattggtcataaagagtcgattaaagacactgcccgcgtgcttggtcgcatgtatgacggtattcagtatcgcggctatggtcaggagattgtcgaaacactggcggaatacgctagcgtgccggtatggaatggcctgaccaatgagttccatcccacgcagctgctggcggatcttctcaccatgcaggagcatttgcccggcaaagcgttcaacgaaatgacgctggtctatgcaggtgacgcgcgtaacaacatgggcaattcgatgctcgaagctgcggcgcttaccggtctggatttgcgtctggtcgcgccacaagcgtgctggccggaagctgcgctggttacggaatgccgcgccctggcacagcaaaatggtgggaatattacgctgactgaagatgtcgcgaagggagttgaaggtgctgactttatctataccgatgtgtgggtgtcgatgggggaagcaaaagagaaatgggcggaacggattgcattgctgcgtgaatatcaggtgaacagcaagatgatgcagttgaccggtaacccggaggtcaaattcctccactgcctgcccgcgtttcatgacgaccaaacgacgcttggcaagaaaatggcggaagaatttggcctacatggcggtatggaagtcactgatgaggtcttcgaatctgccgccagcattgtttttgatcaggcggaaaaccgtatgcatactatcaaagcggtgatggtcgcgacgctcagtaaataa

SEQ ID NO: 346 - DNA, 1344 bp, Escherichia coli
atgacgacgattctcaagcatctcccggtaggtcaacgtattggtatcgctttttctggcggtctggacaccagtgccgcactgctgtggatgcgacaaaagggagcggttccttatgcatatactgcaaacctgggccagccagacgaagaggattatgatgcgatccctcgtcgtgccatggaatacggcgcggagaacgcacgtctgatcgactgccgcaaacaactggtggccgaaggtattgccgctattcagtgtggcgcatttcataacaccaccggcggcctgacctatttcaacacgacgccgctgggccgcgccgtgactggtaccatgctggttgctgcgatgaaagaagatggcgtgaatatctggggtgacggtagcacctacaaaggaaacgatatcgaacgtttctatcgttatggtctgctgaccaatgctgaactgcagatttacaaaccgtggcttgatactgactttattgatgaactgggcggccgtcatgagatgtctgaatttatgattgcctgcggtttcgactacaaaatgtctgtcgaaaaagcctactccacagactccaacatgcttggtgcaacgcatgaagcgaaggatctggaatacctcaactccagcgtcaaaatcgtcaacccgattatgggcgtgaaattctgggatgagagcgtgaagatcccggcagaagaagtcacagtacgctttgaacaaggtcatccggtggcgctgaacggtaaaacctttagcgacgacgtagaaatgatgctggaagctaaccgcatcggcggtcgtcacggcctgggcatgagcgaccagattgaaaaccgtatcatcgaagcgaaaagccgtggtatttacgaagctccggggatggcactgctgcacattgcgtatgaacgcctgttgaccggtattcacaacgaagacaccattgagcagtatcacgcgcatggtcgtcagttgggccgtctgctgtaccaggggcgttggtttgactcccaggcgctgatgctgcgtgactctctgcaacgctgggttgccagccagatcactggtgaagttaccctggagctgcgccgtgggaacgattattcaatcctgaataccgtctcagagaacctgacctacaagccagagcgtctgacgatggaaaaaggcgactcggtgttctcgccagatgatcgtattggtcaattgaccatgcgtaacctggatatcactgatacccgcgagaaacttttcggttatgccaaaactggcctgctttcctcctctgccgcttcaggcgtgccgcaggtggagaatctggaaaacaaaggccagtaa

SEQ ID NO: 347 - DNA, 1374 bp, Escherichia coli
atggcactttggggcgggcgttttacccaggcagcagatcaacggttcaaacaattcaacgactcactgcgctttgattaccgtctggcggagcaggatattgttggctctgtggcctggtccaaagccctggtcacggtaggcgtgttaaccgcagaagagcaggcgcaactggaagaggcgctgaacgtgttgctggaagatgttcgcgccaggccacaacaaatccttgaaagcgacgccgaagatatccatagctgggtggaaggcaaactgatcgacaaagtgggccagttaggcaaaaagctgcataccgggcgtagccgtaatgatcaggtagcgactgacctgaaactgtggtgcaaagataccgttagcgagttactgacggctaaccggcagctgcaatcggcgctggtggaaaccgcacaaaacaatcaggacgcggtaatgccaggttacactcacctgcaacgcgcccagccggtgacgttcgcgcactggtgcctggcctatgttgagatgctggcgcgtgatgaaagccgtttgcaggatgcgcttaagcgtctggatgtcagcccgctaggctgtggcgcgctggcgggaacggcctatgaaatcgaccgtgaacagttagcaggctggctgggctttgcttcggcgacccgtaacagtctcgacagcgtttctgaccgtgaccatgtgttggaactgctttctgctgccgctatcggcatggtgcatctgtcgcgttttgctgaagatctgattttctttaacaccggcgaagcggggtttgtggagctttctgaccgcgtgacttccggttcatcattaatgccgcagaagaaaaacccggatgcgctggagctgattcgcggtaaatgcggccgggtgcagggggcgttaaccggcatgatgatgacgctgaaaggtttgccgctggcttacaacaaagatatgcaggaagacaaagaaggtctgttcgacgcgctcgatacctggctggactgcctgcatatggcggcgctggtgctggacggcattcaggtgaaacgtccacgttgccaggaagcggctcagcagggttacgccaacgccaccgaactggcggattatctggtggcgaaaggcgtaccgttccgcgaggcgcaccatattgttggtgaagcggtggtggaagccattcgtcagggcaaaccgctggaagatctgccgctcagtgagttgcagaaattcagtcaggtgattgacgaagatgtctatccgattctgtcgctgcaatcgtgcctcgacaagcgtgcggcaaaaggcggcgtctcaccgcagcaggtggcgcaggcgattgcttttgcgcaggctcggttagggtaa

SEQ ID NO: 348 - DNA, 1977 bp, Escherichia coli
atgtctgacgacatgtctatgggtttgccttcgtcagcgggcgaacacggtgtactacgctccatgcaggaggttgcaatgagctcccaggaagccagcaagatgctgcgtacttacaatattgcctggtggggcaataactactatgacgttaacgagctgggccacattagcgtgtgcccggacccggacgtcccggaagctcgcgtcgatctcgcgcagttagtgaaaactcgtgaagcacagggccagcgtctgcctgcactgttctgtttcccacagatcctgcagcaccgtttgcgttccattaacgccgcgttcaaacgtgcgagggaatcctacggctataacggcgattacttccttgtttatccgatcaaagttaaccagcaccgccgcgtgattgagtccctgattcattcgggcgaaccgctgggtctggaagccggttccaaagccgagttgatggcagtactggcacatgctggcatgacccgtagcgtcatcgtctgcaacggttataaagaccgcgaatatatccgcctggcattaattggcgagaagatggggcacaaggtctatctggtcattgagaagatgtcagaaatcgccattgtgctggatgaagcagaacgtctgaatgtcgttcctcgtctgggcgtgcgtgcacgtctggcttcgcagggttcgggtaaatggcagtcctccggcggggaaaaatcgaagttcggcctggctgcgactcaggtactgcaactggttgaaaccctgcgtgaagccgggcgtctcgacagcctgcaactactgcacttccacctcggttcgcagatggcgaatattcgcgatatcgcgacaggcgttcgtgaatccgcgcgtttctatgtggaactgcacaagctgggcgtcaatattcagtgcttcgacgtcggcggcggtctgggcgtggattatgaaggtactcgttcgcagtccgactgttcggtgaactacggcctcaatgaatacgccaacaacattatctgggcgattggcgatgcgtgtgaagaaaacggtctgccgcatccgacggtaatcaccgaatcgggtcgtgcggtgactgcgcatcacaccgtgctggtgtctaatatcatcggcgtggaacgtaacgaatacacggtgccgaccgcgcctgcagaagatgcgccgcgcgcgctgcaaagcatgtgggaaacctggcaggagatgcacgaaccgggaactcgccgttctctgcgtgaatggttacacgacagtcagatggatctgcacgacattcatatcggctactcttccggcatctttagcctgcaagaacgtgcatgggctgagcagctttatttgagcatgtgccatgaagtgcaaaagcagctggatccgcaaaaccgtgctcatcgtccgattatcgacgagctgcaggaacgtatggcggacaaaatgtacgtcaacttctcgctgttccagtcgatgccggacgcatgggggatcgaccagttgttcccggttctgccgctggaagggctggatcaagtgccggaacgtcgcgctgtgctgctggatattacctgtgactctgacggtgctatcgaccactatattgatggtgacggtattgccacgacaatgccaatgccggagtacgatccagagaatccgccgatgctcggtttctttatggtcggcgcatatcaggagatcctcggcaacatgcacaacctgttcggtgataccgaagcggttgacgtgttcgtcttccctgacggtagcgtagaagtagaactgtctgacgaaggcgataccgtggcggacatgctgcaatatgtacagctcgatccgaaaacgctgttaacccagttccgcgatcaagtgaagaaaaccgatcttgatgctgaactgcaacaacagttccttgaagagttcgaggcaggtttgtacggttatacttatcttgaagatgagtaa

SEQ ID NO: 349 - DNA, 2268 bp, Escherichia coli
atgaaagtattaattgttgaaagcgagtttctccatcaagacacctgggtcggtaacgccgttgagcgtctggcagatgctttaagccagcaaaatgttaccgtgattaaatccacctcctttgatgatggttttgccattctctcttcaaacgaagccattgactgcctgatgttcagctatcaaatggaacatccggacgaacatcaaaacgtcagacaattgatcggtaagcttcatgagcgccaacaaaacgtgccggtcttcctgttgggcgatcgggaaaaagccctcgccgcaatggatcgcgacctgctggagcttgtcgatgaattcgcctggattctggaagataccgccgactttatcgccggacgcgccgttgccgcgatgacccgctaccgccagcagctgttgccgccactgttcagcgcgctgatgaaatatagtgacatccatgaatattcctgggcagcgccaggccaccagggcggcgttggttttaccaaaacacccgccggacgtttctaccatgactactatggtgaaaatctgttccgcaccgacatgggcatcgaacgaacttccctcggttctttgcttgaccatactggcgcatttggcgaaagcgaaaaatatgccgcacgcgtatttggtgccgatcgctcctggtcggtagtcgtcggtacttccggctctaaccgcaccatcatgcaggcttgcatgaccgataacgatgtcgtggtcgttgaccgtaactgccataaatccatcgaacaaggtttgatgctgacaggcgcgaaaccggtctatatggtgccaagccgcaaccgctacggcattatcgggccaatctatccgcaggaaatgcaacctgaaaccttgcagaagaaaatcagtgaaagcccgctgaccaaagacaaagccgggcaaaaaccgtcttactgcgtggtgaccaactgcacctatgacggcgtgtgttataacgctaaagaagcgcaggatctgctggaaaaaacctccgatcgtctgcactttgacgaagcctggtacggctatgcacgtttcaacccgatctatgccgatcactatgccatgcgcggcgaacctggcgatcacaacggtcctaccgttttcgccacccactccacccacaaactgctgaatgcgctgtcacaggcttcttatattcatgtacgtgaaggtcgtggggcgattaacttctcccgcttcaaccaggcctacatgatgcatgccaccacctccccgctgtatgccatctgcgcatccaacgacgtggcggtgtcgatgatggacggcaacagcggcctgtcactgacacaggaagtgattgacgaagcggttgatttccgtcaggcgatggcgcggctatataaagagttcaccgctgacggtagctggttcttcaaaccgtggaacaaagaagtcgtcaccgacccacaaaccggcaaaacctatgactttgctgacgcaccaaccaaactgctgaccaccgttcaggactgctgggtaatgcatccgggcgaaagctggcacggcttcaaagatattccggataactggagtatgctcgacccgattaaagtcagcatccttgctccgggaatgggtgaagatggtgaactggaagaaaccggtgttccggcggcgctggtcactgcctggcttggtcgccacggcattgtacctacccgcaccactgacttccaaattatgttcctgttctctatgggcgtaacccgtgggaaatggggaactctggttaacaccctttgctccttcaaacgccactatgacgccaacacaccgctggcgcaggtgatgccggaacttgttgaacaatatcctgacacttacgcgaacatggggattcacgatctgggtgacaccatgtttgcctggctgaaagaaaacaaccctggcgcacggttgaacgaagcctattccggcctgccggtggcggaagtcaccccgcgtgaagcgtacaacgcgattgtcgacaacaatgtcgaactggtatccattgaaaatctgccaggacgcatcgcggcaaactcagttatcccgtatccgccaggaatcccgatgctgctgtctggtgaaaacttcggcgataaaaacagtccgcaagtaagttatttacgctcgctgcaatcctgggaccaccatttccctggatttgaacacgaaactgaagggactgaaattattgacggtatttaccacgttatgtgcgtgaaagcgtaa

SEQ ID NO: 350 - DNA, 921 bp, Escherichia coli
atgagcaccttaggtcatcaatacgataactcactggtttccaatgcctttggttttttacgcctgccgatgaacttccagccgtatgacagcgatgcagactgggtgattactggcgtgccgttcgatatggccacttctggtcgtgcgggtggtcgccacggtccggcagcgatccgtcaggtttcgacgaatctggcctgggaacacaaccgcttcccgtggaatttcgacatgcgtgagcgtctgaacgtcgtggactgcggcgatctggtatatgcctttggcgatgcccgtgagatgagcgaaaagctgcaggcgcacgccgagaagctgctggctgccggtaagcgtatgctctctttcggtggtgaccactttgttacgctgccgctgctgcgtgctcatgcgaagcatttcggcaaaatggcgctggtacactttgacgcccacaccgatacctatgcgaacggttgtgaatttgaccacggcactatgttctataccgcgccgaaagaaggtctgatcgacccgaatcattccgtgcagattggtattcgtaccgagtttgataaagacaacggctttaccgtgctggacgcctgccaggtgaacgatcgcagcgtggatgacgttatcgcccaagtgaaacagattgtgggtgatatgccggtttacctgacttttgatatcgactgcctggatcctgcttttgcaccaggcaccggtacgccagtgattggcggcctgacctccgatcgcgctattaaactggtacgcggcctgaaagatctcaacattgttgggatggacgtagtggaagtggctccggcatacgatcagtcggaaatcactgctctggcagcggcaacgctggcgctggaaatgctgtatattcaggcggcgaaaaagggcgagtaa

SEQ ID NO: 351 - DNA, 1380 bp, Escherichia coli
ttgaacaggttaccttcgagcgcatcggctttagcgtgcagcgcccacgccctgaatctcattgagaagcgaacgctggatcatgaggagatgaaagcacttaaccgagaggtgattgaatacttcaaagagcatgtcaatccggggtttttagagtatcgcaaatctgttaccgccggcggggattacggagccgtagagtggcaagcgggaagtttaaatacgcttgtcgacacccagggccaggagtttatcgactgcctgggaggttttggaattttcaacgtggggcaccgtaatccagttgtggtttccgccgtacagaatcaacttgcgaaacaaccgctgcacagccaggagctgctcgatccgttacgggcgatgttggcgaaaacccttgctgcgctaacgcccggtaaactgaaatacagcttcttctgtaatagcggcaccgagtccgttgaagcagcgctgaagctggcgaaagcttaccagtcaccgcgcggcaagtttacttttattgccaccagcggcgcgttccacggtaaatcacttggcgcgctgtcggccacggcgaaatcgaccttccgcaaaccgtttatgccgttactgccgggcttccgtcatgtgccgtttggcaatatcgaagccatgcgcacggctcttaacgagtgcaaaaaaaccggtgatgatgtggctgcggtgatcctcgaaccgattcagggtgaaggtggcgtaattctgccgccgccgggctatctcaccgccgtacgtaagctatgcgatgagttcggcgcactgatgatcctcgatgaagtacaaacgggcatggggcgcacgggcaagatgttcgcctgcgagcatgagaacgtacagccggatatcctctgccttgccaaagcgctcggcggcggcgtgatgccgattggcgcgaccatcgccactgaagaggtgttttcagttctgttcgacaacccattcctgcataccaccacctttggcggcaacccgctggcctgtgcggcggcgctggcgaccatcaatgtgttgctggagcagaacttaccggctcaggctgagcaaaaaggcgatatgttgctggacggtttccgtcaactggcgcgggaatatcccgatctggtacaggaagcgcgtggtaaagggatgttgatggcgattgagtttgttgataacgaaatcggctataactttgccagcgagatgttccgccagcgcgtactggtggccggaacgctcaataacgccaaaacgatccgcattgaaccgccactgacactgaccattgaacagtgtgaactggtgatcaaagcggcgcgtaaggcgctggcggccatgcgagtaagtgtcgaagaagcgtaa

SEQ ID NO: 352 - DNA, 2136 bp, Escherichia coli
atgaaatcaatgaatattgccgccagtagtgaactggtatcccgactttcttctcatcgtcgcgtggtggcgttgggagatactgattttacggacgtcgcggcagtcgtcattaccgctgcggatagtcgcagtggcattcttgcgttgcttaagcgcaccggttttcatctaccggtgtttttgtattccgaacatgctgttgaattacctgcgggcgttacggcggtaatcaacggcaacgagcagcagtggctggagctggaatccgcagcctgtcagtatgaagagaatttgctgccaccgttttatgacacgctgacgcagtacgttgagatgggcaacagcacctttgcttgccctggacatcaacatggtgcgttttttaaaaagcatcctgccggacgccatttttacgatttctttggtgagaacgtctttcgcgccgatatgtgtaacgctgacgtaaaattgggcgatctgcttattcatgaaggatcggcgaaagatgcgcagaaattcgcagccaaagtctttcatgccgataaaacctattttgtgctgaacggcacatcggcagcgaataaagtggtgacgaatgcgctgttaacgcgtggcgatctggtgctcttcgaccgtaacaaccataagtcgaatcatcacggcgcgctgattcaggcgggggcgacgccggtctatctggaagcttcacgcaacccgtttggtttcattggcggtattgatgcgcactgttttaatgaagagtatctgcgccagcaaattcgcgacgttgcgccagaaaaagccgacctgccgcgcccgtatcgcctggcgattattcagctgggaacctatgacggcactgtctataacgcccgtcaggtgatcgataccgttgggcatctgtgtgattacattctgtttgattccgcgtgggtcggttatgaacaatttatcccgatgatggcggatagctcgccgctgctgttagaacttaacgaaaacgatccggggatctttgtgactcagtcggtgcacaaacagcaggcgggattctcacagacgtcgcagatccataaaaaagataaccatatccgcggacaggcgcgtttttgcccgcataagcggttgaataacgcctttatgctccatgcttctaccagccctttctatccgctgtttgctgcactggatgttaacgccaaaattcatgaaggggagagtgggcgtcggctgtgggctgagtgtgttgagatagggattgaagcgcgcaaggctattcttgcgcgctgtaagctgttccgcccgtttatcccgcccgttgttgatggcaaattgtggcaggattatccgacatcagtgttagccagcgaccgccgttttttcagttttgagccgggggcgaagtggcacggctttgaaggatatgccgcggatcagtattttgttgatccgtgcaagctgttactcactacaccaggtatcgatgccgaaaccggcgaatatagcgactttggcgttccggcgacgattctggcgcactatctgcgtgagaacggcattgtgccggagaagtgcgatctcaactccattctgtttttattaactccggcggaaagccacgagaagctggcacaactggtggcgatgctggcgcaatttgaacagcatattgaggatgactcgccgctggttgaggtgttgccgagcgtttataacaagtatccggtgcgctatcgcgactacaccctgcgccagttgtgtcaggagatgcacgatctgtatgtcagtttcgacgtcaaagacctacaaaaagcgatgttccgccagcagagtttcccgtcagtggtgatgaacccccaggatgcgcatagcgcttatattcgcggtgacgtggagttggtgcggattcgtgatgccgaagggcgaattgcggcagaaggggcgttgccttatccacctggcgtgctttgcgtggtacccggggaagtctggggtggggcggttcaacgttatttccttgcactggaagaaggggtgaatttgttgccgggattttcgccggagctgcaaggtgtttatagcgaaaccgatgcggatggcgtgaaacggttgtacggttatgtgttgaagtaa

SEQ ID NO: 353 - DNA, 2199 bp, Escherichia coli
atgtcaaaattaaaaattgcggttagtgattcttgcccggactgttttaccacgcagcgagaatgtatctacattaatgaaagtcgtaatatcgatgtggcggcaatagttttatcgctcaacgatgttacatgcggaaaactcgatgaaatcgatgccacgggttatggcatcccggtatttattgctactgaaaatcaagaacgtgtacccgcagagtatttgccccgtatttcgggtgtctttgagaattgcgaatcgcgacgagaattttatggtcgccagttagaaaccgctgccagccattatgaaactcaactgcgcccacctttcttccgcgcactggtcgattatgtcaatcaaggtaacagcgcgtttgattgccctggtcatcagggcggcgaatttttccgtcgccatccggcggggaatcagtttgtggaatactttggtgaggcgctgttccgtgccgacttgtgcaacgccgacgtagcgatgggcgatctgctgattcacgaaggcgcgccatgcattgcacagcaacatgcggcaaaagtgtttaatgccgataaaacctacttcgttttaaatggcacttcatcttctaacaaagtggttttaaacgccctgctaacaccgggtgatctggtgctgtttgatcgcaataaccacaaatctaaccaccacggagcgttgctacaggctggtgcaacaccggtttatctggaaacggcacgtaacccgtatggctttatcggtggcattgatgcgcactgttttgaagaaagttacctgcgtgagctgatcgcggaagtcgcaccgcagcgggcaaaagaggctcgtcctttccgcctcgctgtgattcagttaggcacctacgacggtacgatttataacgcccgccaagtggtggataaaattggtcatctgtgtgactacatcctgtttgactcagcatgggtcggctatgaacagtttattccgatgatggcggactgttcgccgctgttgctggatcttaatgagaacgatccgggtattctggttacgcaatctgtgcataaacaacaggctggtttttctcagacttcacaaattcataaaaaagacagccacatcaaagggcaacagcgttatgtaccgcacaaacgcatgaacaacgcctttatgatgcacgcctccaccagcccgttctatccgctgtttgccgcactgaatatcaacgccaaaatgcatgaaggtgtcagcggtcgtaatatgtggatggattgtgtggtaaatggcattaatgcccgcaaactgatcctcgataactgtcagcatattcgtccgttcgtacctgaactggtggatggtaaaccctggcagtcgtatgaaacagcgcaaattgcggttgatctgcgcttcttccagtttgtaccaggggaacactggcattcttttgaaggctatgcagagaatcaatactttgtcgatccatgcaaactgttgctgacaaccccaggtattgatgcacgtaacggcgaatatgaagcgttcggtgtacccgcgacgattcttgctaacttcctgcgcgaaaatggcgtagtgccggaaaaatgcgatcttaactccatcctcttcctgctgactccggcagaagatatggccaaacttcagcaacttgttgccctgctggtacgcttcgaaaaactgcttgagtccgacgcgccattagcagaagtgctaccttccatctacaaacagcatgaagagcgctacgccggttataccctgcgtcagttgtgtcaggaaatgcatgatttgtatgcccgccacaacgtgaaacaactgcaaaaagagatgttccgtaaggagcacttcccacgcgtcagcatgaatccgcaagaagccaactacgcctatttacgcggtgaagtggaactggttcgtctgccggatgcagaaggccgtatcgctgccgaaggtgcgcttccttatcctccgggtgtgctgtgtgttgttccgggtgaaatctggggtggtgctgttctgcgttacttcagcgctctggaagaagggatcaacctgctgccaggttttgcaccggagctgcagggtgtctatatcgaagaacatgatggtcgtaagcaagtttggtgctatgtcatcaagcctcgtgatgcgcaaagcaccctgttgaaaggggaaaaattatga

SEQ ID NO: 354 - DNA, 1266 bp, Escherichia coli
atgagcaacaatgaattccatcagcgtcgtctttctgccactccgcgcggggttggcgtgatgtgtaacttcttcgcccagtcggctgaaaacgccacgctgaaggatgttgagggcaacgagtacatcgatttcgccgcaggcattgcggtgctgaataccggacatcgccaccctgatctggtcgcggcggtggagcagcaactgcaacagtttacccacaccgcgtatcagattgtgccgtatgaaagctacgtcaccctggcggagaaaatcaacgcccttgccccggtgagcgggcaggccaaaaccgcgttcttcaccaccggtgcggaagcggtggaaaacgcggtgaaaattgctcgcgcccataccggacgccctggcgtgattgcgtttagcggcggctttcacggtcgtacgtatatgaccatggcgctgaccggaaaagttgcgccgtacaaaatcggcttcggcccgttccctggttcggtgtatcacgtaccttatccgtcagatttacacggcatttcaacacaggactccctcgacgccatcgaacgcttgtttaaatcagacatcgaagcgaagcaggtggcggcgattattttcgaaccggtgcagggcgagggcggtttcaacgttgcgccaaaagagctggttgccgctattcgccgcctgtgcgacgagcacggtattgtgatgattgctgatgaagtgcaaagcggctttgcgcgtaccggtaagctgtttgccatggatcattacgccgataagccggatttaatgacgatggcgaaaagcctcgcgggcgggatgccgctttcgggcgtggtcggtaacgcgaatattatggacgcacccgcgccgggcgggcttggcggcacctacgccggtaacccgctggcggtggctgccgcgcacgcggtgctcaacattatcgacaaagaatcactctgcgaacgcgcgaatcaactgggccagcgtctcaaaaacacgttgattgatgccaaagaaagcgttccggccattgctgcggtacgcggcctggggtcgatgattgcggtagagtttaacgatccgcaaacgggcgagccgtcagcggcgattgcacagaaaatccagcaacgcgcgctggcgcaggggctgctcctgctgacctgtggcgcatacggcaacgtgattcgcttcctgtatccgctgaccatcccggatgcgcaattcgatgcggcaatgaaaattttgcaggatgcgctgagcgattaa

SEQ ID NO: 355 - DNA, 1281 bp, Escherichia coli
atgaacagcaataaagagttaatgcagcgccgcagtcaggcgattccccgtggcgttgggcaaattcacccgattttcgctgaccgcgcggaaaactgccgggtgtgggacgttgaaggccgtgagtatcttgatttcgcgggcgggattgcggtgctcaataccgggcacctgcatccgaaggtggtggccgcggtggaagcgcagttgaaaaaactgtcgcacacctgcttccaggtgctggcttacgagccgtatctggagctgtgcgagattatgaatcagaaggtgccgggcgatttcgccaagaaaacgctgctggttacgaccggttccgaagcggtggaaaacgcggtaaaaatcgcccgcgccgccaccaaacgtagcggcaccatcgcttttagcggcgcgtatcacgggcgcacgcattacacgctggcgctgaccggcaaggtgaatccgtactctgcgggcatggggctgatgccgggtcatgtttatcgcgcgctttatccttgcccgctgcacggcataagcgaggatgacgctatcgccagcatccaccggatcttcaaaaatgatgccgcgccggaagatatcgccgccatcgtgattgagccggttcagggcgaaggcggtttctacgcctcgtcgccagcctttatgcagcgtttacgcgctctgtgtgacgagcacgggatcatgctgattgccgatgaagtgcagagcggcgcggggcgtaccggcacgctgtttgcgatggagcagatgggcgttgcgccggatcttaccacctttgcgaaatcgatcgcgggcggcttcccgctggcgggcgtcaccgggcgcgcggaagtaatggatgccgtcgctccaggcggtctgggcggcacctatgcgggtaacccgattgcctgcgtggctgcgctggaagtgttgaaggtgtttgagcaggaaaatctgctgcaaaaagccaacgatctggggcagaagttgaaagacggattgctggcgatagccgaaaaacacccggagatcggcgacgtacgcgggctgggggcgatgatcgccattgagctgtttgaagacggcgatcacaacaagccggacgccaaactcaccgccgagatcgtggctcgcgcccgcgataaaggcctgattcttctctcctgcggcccgtattacaacgtgctgcgcatccttgtaccgctcaccattgaagacgctcagatccgtcagggtctggagatcatcagccagtgttttgatgaggcgaagcagtag

SEQ ID NO: 356 - DNA, 1281 bp, Escherichia coli; identical to SEQ ID NO: 355

SEQ ID NO: 357 - DNA, 867 bp, Escherichia coli
atggccgaaaaaaaacagtggcatgaaacgctacacgaccagtttgggcagtactttgcggtagataacgttctgtatcatgaaaagaccgatcaccaggatctgatcatttttgagaacgctgcatttggtcgcgtaatggcgctggatggcgtagtacaaaccaccgagcgcgacgagtttatctatcatgagatgatgacccatgttccgctactggcccatggtcacgcgaaacatgtgctgattatcggcggcggcgacggtgccatgctgcgtgaagtaacccgacataaaaacgttgagtcaatcacgatggtggaaatcgatgcgggtgtcgtatcgttctgccgtcagtatctacccaaccataacgccggtagctacgacgatccgcgctttaagctggtgatcgacgatggcgtcaatttcgttaatcaaaccagccagacctttgatgtcattatctccgactgcaccgatcctatcggtcccggcgaaagccttttcacttcggcattttatgaaggctgcaaacgttgcctgaatcctggcggtatcttcgtcgcacaaaacggcgtctgctttttacagcaggaagaagccatcgacagccatcgcaaactcagccattacttcagcgacgttggcttttatcaggcggcgatcccgacctattacggcggtatcatgacttttgcatgggcgacagataacgacgccttacgccatctctcaaccgaaattattcaggcgcgttttctcgcctctggcctgaaatgccgttattacaatccggcaatccatacggcagcttttgccttacctcagtatctgcaagacgcactggcttcacagccgtcctaa

SEQ ID NO: 358 - DNA, 795 bp, Escherichia coli
ttgaaaaaactgaaactgcatggctttaataatctgaccaaaagtctgagtttttgtatttacgatatctgctacgccaaaactgccgaagagcgcgacggttatattgcttatatcgatgaactctataatgccaaccgtctgaccgaaatcctgtcagaaacctgttccattatcggggctaatattcttaacatcgcccgccaggattacgaaccacagggtgccagcgtcactattctggtgagtgaagaaccggttgacccgaaactcatcgacaaaacagaacaccccggcccactgccagaaacggtcgttgcccatcttgataaaagtcatatttgcgtacatacctacccggaaagtcatcctgaaggcggtttatgtaccttccgcgccgatattgaagtctctacctgcggcgtgatttctccgctgaaggcgctgaattacctgatccaccagcttgagtccgatatcgtaaccattgattatcgcgtgcgcggttttacccgcgacattaacggtatgaagcactttatcgaccatgagattaattcgattcagaactttatgtctgacgatatgaaggcgctgtatgacatggtggatgtgaacgtctatcaggaaaatatcttccataccaagatgttgcttaaagagttcgaccttaagcactacatgttccacaccaaaccggaagacttaaccgacagcgagcgccaggaaattaccgctgcgctgtggaaagaaatgcgcgagatttattacgggcgcaatatgccagctgtttaa

SEQ ID NO: 359 - DNA, 822 bp, Escherichia coli
atgcatgatgcaaacatccgcgttgccatcgcgggagccggggggcgtatgggccgccagttgattcaggcggcgctggcattagagggcgtgcagttgggcgctgcgctggagcgtgaaggatcttctttactgggcagcgacgccggtgagctggccggagccgggaaaacaggcgttaccgtgcaaagcagcctcgatgcggtaaaagatgattttgatgtgtttatcgattttacccgtccggaaggtacgctgaaccatctcgctttttgtcgccagcatggcaaagggatggtgatcggcactacggggtttgacgaagccggtaaacaagcaattcgtgacgccgctgccgatattgcgattgtctttgctgccaattttagcgttggcgttaacgtcatgcttaagctgctggagaaagcagccaaagtgatgggtgactacaccgatatcgaaattattgaagcacatcatagacataaagttgatgcgccgtcaggcaccgcactggcaatgggagaggcgatcgcccacgcccttgataaagatctgaaagattgcgcggtctacagtcgtgaaggccacaccggtgaacgtgtgcctggcaccattggttttgccaccgtgcgtgcaggtgacatcgttggtgaacataccgcgatgtttgccgatattggcgagcgtctggagatcacccataaggcgtccagccgtatgacatttgctaacggcgcggtaagatcggctttgtggttgagtggtaaggaaagcggtctttttgatatgcgagatgtacttgatctcaataatttgtaa

SEQ ID NO: 360 - DNA, 825 bp, Escherichia coli
atgcagcagttacagaacattattgaaaccgcttttgaacgccgtgccgagatcacgccagccaatgcagacaccgttacccgcgaagcggtaaatcaggtgatcgccctgctggattccggcgcactgcgtgtagcggaaaaaattgacggtcagtgggtgacgcatcagtggttgaaaaaagcggtgctgctctctttccgtattaatgataatcaggtgatcgaaggggcagaaagccgctacttcgacaaagtgccgatgaaattcgccgactacgacgaagcacgtttccagaaagaaggcttccgcgttgtgccaccagcggcggtacgtcagggtgcgtttattgcccgtaacaccgtgctgatgccgtcttacgtcaacatcggcgcatatgttgatgaaggcaccatggttgatacctgggcgaccgtcggttcttgtgcgcagattggtaaaaacgtccacctttccggtggcgtgggcatcggcggcgtgctggaaccgctgcaggctaacccaaccatcattgaagataattgcttcatcggcgcgcgctctgaagtggttgaaggggtgattgtcgaagaaggttccgtcatttccatgggcgtatacattggtcagagcacccgtatttacgaccgtgaaaccggcgaaatccactacggtcgcgttccggcggggtctgtggttgtttcaggtaatctgccgtcaaaagatggcaaatacagcctctactgtgcggttatcgttaagaaagttgacgcgaaaactcgcggcaaagtcggcattaacgaactgctgcgtaccatcgactaa

SEQ ID NO: 361 - DNA, 1128 bp, Escherichia coli
atgtcgtgcccggttattgagctgacacaacagcttattcgccgcccttccctgagtcctgatgatgcaggatgccaggctttgttgattgaacgtttgcaggcgatcggttttaccgttgaacgcatggactttgccgatacgcagaatttttgggcatggcgtgggcagggtgaaacgttagcctttgccgggcataccgacgtggtgccgcctggcgacgccgatcgttggatcaatcccccgtttgaacccaccattcgtgacggcatgttattcgggcgcggtgcggcagatatgaaaggctcgctggcggcgatggtggtggcggcagaacgttttgtcgcacaacatcccaaccatacggggcgactggcatttctgatcacctctgatgaagaagccagtgcccacaacggtacggtaaaagtcgtcgaagcgttaatggcacgtaatgagcgtctcgattactgcctggttggcgaaccgtcgagtatcgaagtggtaggtgatgtggtgaaaaatggtcgtcgcggatcattaacctgcaaccttaccattcatggcgttcaggggcatgttgcctacccacatctggctgacaatccggtacatcgcgcagcacctttccttaatgaattagtggctattgagtgggatcagggcaatgaattcttcccggcgaccagtatgcagattgccaatattcaggcgggaacgggcagtaacaacgttattccgggtgaactgtttgtgcagtttaacttccgcttcagcaccgaactgactgatgagatgatcaaagcgcaggtgcttgccctgcttgaaaaacatcaactgcgctatacggtggattggtggctttccgggcagccatttttgaccgcgcgcggtaaactggtggatgcggtcgttaacgcggttgagcactataatgaaattaaaccgcagctactgaccacaggcggaacgtccgacgggcgctttattgcccgcatgggggcgcaggtggtggaactcgggccggtcaatgccactattcataaaattaatgaatgtgtgaacgctgccgacctgcagctacttgcccgtatgtatcaacgtatcatggaacagctcgtcgcctga

SEQ ID NO: 362 - DNA, 825 bp, Escherichia coli
atgcagttctcgaaaatgcatggccttggcaacgattttatggtcgtcgacgcggtaacgcagaatgtctttttttcaccggagctgattcgtcgcctggctgatcggcacctgggggtagggtttgaccaactgctggtggttgagccgccgtatgatcctgaactggattttcactatcgcattttcaatgctgatggcagtgaagtggcgcagtgcggcaacggtgcgcgctgctttgcccgttttgtgcgtctgaaaggactgaccaataagcgtgatatccgcgtcagcaccgccaacgggcggatggttctgaccgtcaccgatgatgatctggtccgcgtaaatatgggcgaacccaacttcgaaccttccgccgtgccgtttcgcgctaacaaagcggaaaagacctatattatgcgcgccgccgagcagacaatcttatgcggcgtggtgtcgatgggaaatccgcattgcgtgattcaggtcgatgatgtcgataccgcggcggtagaaacgcttggtcctgttctggaaagccacgagcgttttccggagcgcgccaatatcggttttatgcaagtggttaagcgcgagcatattcgtttacgcgtttatgagcgtggggcaggagaaacccaggcctgcggcagcggcgcgtgtgcggcggttgcagtagggattcagcaaggtttgctggccgaagaagtacgcgtggaactccccggcggtcgtcttgatatcgcctggaaaggtccgggtcacccgttatatatgactggcccggcggtacatgtctacgacggatttattcatctatga

SEQ ID NO: 363 - DNA, 1263 bp, Escherichia coli
atgccacattcactgttcagcaccgataccgatctcaccgccgaaaatctgctgcgtttgcccgctgaatttggctgcccggtgtgggtctacgatgcgcaaattattcgtcggcagattgcagcgctgaaacagtttgatgtggtgcgctttgcacagaaagcctgttccaatattcatattttgcgcttaatgcgtgagcagggcgtgaaagtggattccgtctcgttaggcgaaatagagcgtgcgttggcggcgggttacaatccgcaaacgcaccccgatgatattgtttttacggcagatgttatcgatcaggcgacgcttgaacgcgtcagtgaattgcaaattccggtgaatgcgggttctgttgatatgctcgaccaactgggccaggtttcgccagggcatcgggtatggctgcgcgttaatccggggtttggtcacggacatagccaaaaaaccaataccggtggcgaaaacagcaagcacggtatctggtacaccgatctgcccgccgcactggacgtgatacaacgtcatcatctgcagctggtcggcattcacatgcacattggttctggcgttgattatgcccatctggaacaggtgtgtggtgctatggtgcgtcaggtcatcgaattcggtcaggatttacaggctatttctgcgggcggtgggctttctgttccttatcaacagggtgaagaggcggttgataccgaacattattatggtctgtggaatgccgcgcgtgagcaaatcgcccgccatttgggccaccctgtgaaactggaaattgaaccgggtcgcttcctggtagcgcagtctggcgtattaattactcaggtgcggagcgtcaaacaaatggggagccgccactttgtgctggttgatgccgggttcaacgatctgatgcgcccggcaatgtacggtagttaccaccatatcagtgccctggcagctgatggtcgttctctggaacacgcgccaacggtggaaaccgtcgtcgccggaccgttatgtgaatcgggcgatgtctttacccagcaggaagggggaaatgttgaaacccgcgccttgccggaagtgaaggcaggtgattatctggtactgcatgatacaggggcatatggcgcatcaatgtcatccaactacaatagccgtccgctgttaccagaagttctgtttgataatggtcaggcgcggttgattcgccgtcgccagaccatcgaagaattactggcgctggaattgctttaa

SEQ ID NO: 364 - DNA, 2148 bp, Escherichia coli
atgaacgttattgcaatattgaatcacatgggggtttattttaaagaagaacccatccgtgaacttcatcgcgcgcttgaacgtctgaacttccagattgtttacccgaacgaccgtgacgacttattaaaactgatcgaaaacaatgcgcgtctgtgcggcgttatttttgactgggataaatataatctcgagctgtgcgaagaaattagcaaaatgaacgagaacctgccgttgtacgcgttcgctaatacgtattccactctcgatgtaagcctgaatgacctgcgtttacagattagcttctttgaatatgcgctgggtgctgctgaagatattgctaataagatcaagcagaccactgacgaatatatcaacactattctgcctccgctgactaaagcactgtttaaatatgttcgtgaaggtaaatatactttctgtactcctggtcacatgggcggtactgcattccagaaaagcccggtaggtagcctgttctatgatttctttggtccgaataccatgaaatctgatatttccatttcagtatctgaactgggttctctgctggatcacagtggtccacacaaagaagcagaacagtatatcgctcgcgtctttaacgcagaccgcagctacatggtgaccaacggtacttccactgcgaacaaaattgttggtatgtactctgctccagcaggcagcaccattctgattgaccgtaactgccacaaatcgctgacccacctgatgatgatgagcgatgttacgccaatctatttccgcccgacccgtaacgcttacggtattcttggtggtatcccacagagtgaattccagcacgctaccattgctaagcgcgtgaaagaaacaccaaacgcaacctggccggtacatgctgtaattaccaactctacctatgatggtctgctgtacaacaccgacttcatcaagaaaacactggatgtgaaatccatccactttgactccgcgtgggtgccttacaccaacttctcaccgatttacgaaggtaaatgcggtatgagcggtggccgtgtagaagggaaagtgatttacgaaacccagtccactcacaaactgctggcggcgttctctcaggcttccatgatccacgttaaaggtgacgtaaacgaagaaacctttaacgaagcctacatgatgcacaccaccacttctccgcactacggtatcgtggcgtccactgaaaccgctgcggcgatgatgaaaggcaatgcaggtaagcgtctgatcaacggttctattgaacgtgcgatcaaattccgtaaagagatcaaacgtctgagaacggaatctgatggctggttctttgatgtatggcagccggatcatatcgatacgactgaatgctggccgctgcgttctgacagcacctggcacggcttcaaaaacatcgataacgagcacatgtatcttgacccgatcaaagtcaccctgctgactccggggatggaaaaagacggcaccatgagcgactttggtattccggccagcatcgtggcgaaatacctcgacgaacatggcatcgttgttgagaaaaccggtccgtataacctgctgttcctgttcagcatcggtatcgataagaccaaagcactgagcctgctgcgtgctctgactgactttaaacgtgcgttcgacctgaacctgcgtgtgaaaaacatgctgccgtctctgtatcgtgaagatcctgaattctatgaaaacatgcgtattcaggaactggctcagaatatccacaaactgattgttcaccacaatctgccggatctgatgtatcgcgcatttgaagtgctgccgacgatggtaatgactccgtatgctgcattccagaaagagctgcacggtatgaccgaagaagtttacctcgacgaaatggtaggtcgtattaacgccaatatgatccttccgtacccgccgggagttcctctggtaatgccgggtgaaatgatcaccgaagaaagccgtccggttctggagttcctgcagatgctgtgtgaaatcggcgctcactatccgggctttgaaaccgatattcacggtgcataccgtcaggctgatggccgctataccgttaaggtattgaaagaagaaagcaaaaaataa

SEQ ID NO: 365 - DNA, 2142 bp, Escherichia coli
atgaacatcattgccattatgggaccgcatggcgtcttttataaagatgagcccatcaaagaactggagtcggcgctggtggcgcaaggctttcagattatctggccacaaaacagcgttgatttgctgaaatttatcgagcataaccctcgaatttgcggcgtgatttttgactgggatgagtacagtctcgatttatgtagcgatatcaatcagcttaatgaatatctcccgctttatgccttcatcaacacccactcgacgatggatgtcagcgtgcaggatatgcggatggcgctctggttttttgaatatgcgctggggcaggcggaagatatcgccattcgtatgcgtcagtacaccgacgaatatcttgataacattacaccgccgttcacgaaagccttgtttacctacgtcaaagagcggaagtacaccttttgtacgccggggcatatgggcggcaccgcatatcaaaaaagcccggttggctgtctgttttatgattttttcggcgggaatactcttaaggctgatgtctctatttcggtcaccgagcttggttcgttgctcgaccacaccgggccacacctggaagcggaagagtacatcgcgcggacttttggcgcggaacagagttatatcgttaccaacggaacatcgacgtcgaacaaaattgtgggtatgtacgccgcgccatccggcagtacgctgttgatcgaccgcaattgtcataaatcgctggcgcatctgttgatgatgaacgatgtagtgccagtctggctgaaaccgacgcgtaatgcgttggggattcttggtgggatcccgcgccgtgaatttactcgcgacagcatcgaagagaaagtcgctgctaccacgcaagcacaatggccggttcatgcggtgatcaccaactccacctatgatggcttgctctacaacaccgactggatcaaacagacgctggatgtcccgtcgattcacttcgattctgcctgggtgccgtacacccattttcatccgatctaccagggtaaaagtggtatgagcggcgagcgtgttgcgggaaaagtgatcttcgaaacgcaatcgacccacaaaatgctggcggcgttatcgcaggcttcgctgatccacattaaaggcgagtatgacgaagaggcctttaacgaagcctttatgatgcataccaccacctcgcccagttatcccattgttgcttcggttgagacggcggcggcgatgctgcgtggtaatccgggcaaacggctgattaaccgttcagtagaacgagctctgcattttcgcaaagaggtccagcggctgcgggaagagtctgacggttggtttttcgatatctggcaaccgccgcaggtggatgaagccgaatgctggcccgttgcgcctggcgaacagtggcacggctttaacgatgcggatgccgatcatatgtttctcgatccggttaaagtcactattttgacaccggggatggacgagcagggcaatatgagcgaggaggggatcccggcggcgctggtagcaaaattcctcgacgaacgtgggatcgtagtagagaaaaccggcccttataacctgctgtttctctttagtattggcatcgataaaaccaaagcaatgggattattgcgtgggttgacggaattcaaacgctcttacgatctcaacctgcggatcaaaaatatgctacccgatctctatgcagaagatcccgatttctaccgcaatatgcgtattcaggatctggcacaagggatccataagctgattcgtaaacacgatcttcccggtttgatgttgcgggcattcgatactttgccggagatgatcatgacgccacatcaggcatggcaacgacaaattaaaggcgaagtagaaaccattgcgctggaacaactggtcggtagagtatcggcaaatatgatcctgccttatccaccgggcgtaccgctgttgatgcctggagaaatgctgaccaaagagagccgcacagtactcgattttctactgatgctttgttccgtcgggcaacattaccccggttttgaaacggatattcacggcgcgaaacaggacgaagacggcgtttaccgcgtacgagtcctaaaaatggcgggataa

SEQ ID NO: 366 - DNA, 948 bp, Escherichia coli
gtgcctgatatgaagctttttgctggtaacgccaccccggaactagcacaacgtattgccaaccgcctgtacacttcactcggcgacgccgctgtaggtcgctttagcgatggcgaagtcagcgtacaaattaatgaaaatgtacgcggtggtgatattttcatcatccagtccacttgtgcccctactaacgacaacctgatggaattagtcgttatggttgatgccctgcgtcgtgcttccgcaggtcgtatcaccgctgttatcccctactttggctatgcgcgccaggaccgtcgcgtccgttccgctcgtgtaccaatcactgcgaaagtggttgcagacttcctctccagcgtcggtgttgaccgtgtgctgacagtggatctgcacgctgaacagattcagggtttcttcgacgttccggttgataacgtatttggtagcccgatcctgctggaagacatgctgcagctgaatctggataacccaattgtggtttctccggacatcggcggcgttgtgcgtgcccgcgctatcgctaagctgctgaacgataccgatatggcaatcatcgacaaacgtcgtccgcgtgcgaacgtttcacaggtgatgcatatcatcggtgacgttgcaggtcgtgactgcgtactggtcgatgatatgatcgacactggcggtacgctgtgtaaagctgctgaagctctgaaagaacgtggtgctaaacgtgtatttgcgtacgcgactcacccgatcttctctggcaacgcggcgaacaacctgcgtaactctgtaattgatgaagtcgttgtctgcgataccattccgctgagcgatgaaatcaaatcactgccgaacgtgcgtactctgaccctgtcaggtatgctggccgaagcgattcgtcgtatcagcaacgaagaatcgatctctgccatgttcgaacactaa

SEQ ID NO: 367 - DNA, 1596 bp, Escherichia coli; identical to SEQ ID NO: 267

SEQ ID NO: 368 - DNA, 1518 bp, Escherichia coli
atgtgcggtattgtcggtatcgccggtgttatgccggttaaccagtcgatttatgatgccttaacggtgcttcagcatcgcggtcaggatgccgccggcatcatcaccatagatgccaataactgcttccgtttgcgtaaagcgaacgggctggtgagcgatgtatttgaagctcgccatatgcagcgtttgcagggcaatatgggcattggtcatgtgcgttaccccacggctggcagctccagcgcctctgaagcgcagccgttttacgttaactccccgtatggcattacgcttgcccacaacggcaatctgaccaacgctcacgagttgcgtaaaaaactgtttgaagaaaaacgccgccacatcaacaccacttccgactcggaaattctgcttaatatcttcgccagcgagctggacaacttccgccactacccgctggaagccgacaatattttcgctgccattgctgccacaaaccgcttaatccgcggcgcgtatgcctgtgtggcgatgattatcggccacggtatggttgctttccgcgatccaaacgggattcgtccgctggtactgggaaaacgtgatattgacgagaaccgtacagaatatatggtcgcttccgaaagcgtagcgctcgatacgctgggctttgatttcctgcgtgacgtcgcgccgggcgaagcgatttacatcactgaagaagggcagttgtttacccgtcaatgtgctgacaatccggtcagcaatccgtgcctgtttgagtatgtatactttgcccgcccggactcgtttatcgacaaaatttccgtttacagcgcgcgtgtgaatatgggcacgaaactgggcgagaaaattgcccgcgaatgggaagatctggatatcgacgtggtgatcccgatcccagaaacctcgtgtgatatcgcgctggaaattgctcgtattctgggcaaaccgtaccgccagggcttcgttaaaaaccgctatgttggccgcacctttatcatgccgggccagcagctgcgtcgtaagtccgtgcgccgtaaactgaatgccaaccgcgccgagttccgcgataaaaacgtcctgctggtcgacgactccatcgtccgtggcaccacttctgagcagattatcgagatggcacgcgaagccggagcgaagaaagtgtacctcgcttctgcggcaccggaaattcgcttcccgaacgtttatggtattgatatgccgagcgccacggaactgatcgctcacggtcgcgaagttgatgaaattcgccagatcatcggtgctgacgggttgattttccaggatctgaacgatctgatcgacgccgttcgcgctgaaaatccggatatccagcagtttgaatgctcggtgttcaacggcgtctacgtcaccaaagatgttgatcagggctacctcgatttcctcgatacgttacgtaatgatgacgccaaagcagtgcaacgtcagaacgaagtggaaaatctcgaaatgcataacgaaggatga

SEQ ID NO: 369 - DNA, 1290 bp, Escherichia coli
atgaaagtattagtgattggtaacggcgggcgcgagcacgcgctggcctggaaagcggcccagtcgccgctggttgagactgtttttgttgctccgggtaatgcaggcactgcactggaacccgcgctgcaaaacgttgctattggcgtgaccgatatcccggcgctgttggatttcgcacaaaacgaaaagattgatctgaccatcgtcggcccggaagcgccgctggtgaaaggcgtggtcgataccttccgcgccgccgggctgaaaatcttcggcccaaccgcaggtgcggcccaactggaaggctcaaaagcgtttaccaaagatttcctggcccgccataagatccctacggcggaataccagaacttcaccgaggtagaacctgcgctggcgtatctgcgtgagaaaggcgcgccaatcgtcattaaagcggacggtctggctgccgggaaaggcgttatcgtggcgatgacgctggaagaagcggaagcggctgttcacgatatgctggcgggcaacgcttttggcgacgcgggtcatcgcatcgttatcgaagagttcctcgatggcgaagaagcgagctttatcgtgatggtggacggcgagcatgtgctgccgatggctaccagccaggatcacaaacgcgtaggcgataaagataccggaccaaacaccggcgggatgggcgcttactcccccgcgccggtagtaaccgatgacgttcatcagcgcaccatggaacgtattatctggccaaccgtgaaaggcatggcggcggaaggcaacacctacaccggttttctctacgcgggcctgatgatcgacaaacagggcaatccgaaggttattgaatttaactgccgctttggcgatccggaaacccagccgattatgctgcgcatgaagtccgatctggttgagctctgcctggcggcctgtgaaagcaaactggacgagaaaacgtccgagtgggatgaacgcgcttctctcggcgtggtgatggctgcgggtggatatccgggtgattaccgcaccggtgacgtgatccacggcctgccgctggaagaagtggcaggcggcaaagtgttccacgcgggcacaaaactggcggatgacgagcaggtagtgaccaacggcgggcgcgtactgtgcgtcaccgcgctgggtcataccgtggcagaagcgcagaaacgcgcctatgccttaatgaccgatatccactgggacgactgcttctgccggaaagatatcggctggcgcgctatcgaacgcgagcagaactaa

SEQ ID NO: 370 - DNA, 1179 bp, Escherichia coli
atgacgttattaggcactgcgctgcgtccggcagcaactcgcgtgatgttattaggctccggtgaactgggtaaagaagtggcaatcgagtgtcagcgtctcggcgtagaggtgattgccgtcgatcgctatgccgacgcaccagccatgcatgtcgcgcatcgctcccatgtcattaatatgcttgatggtgatgcattacgccgtgtggttgaactggaaaaaccacattatatcgtgccggagatcgaagctattgccaccgatatgctgatccaacttgaagaggaaggactgaatgttgtcccctgcgctcgcgcaacgaaattaacgatgaatcgcgagggtatccgtcgcctggcggcagaagagctgcagctgcccacttccacttatcgttttgccgatagcgaaagccttttccgcgaggcggttgctgacattggctatccctgcattgtaaaaccggtgatgagctcttccggcaaggggcagacgtttattcgttctgcagagcaacttgctcaggcatggaagtacgctcagcaaggcggtcgcgccggagcgggccgcgtaattgttgaaggcgtcgttaagtttgacttcgaaattaccctgctaaccgtcagcgcggtggatggcgtccatttctgtgcaccagtaggtcatcgccaggaagatggcgactaccgtgaatcctggcaaccacagcaaatgagcccgcttgcccttgaacgtgcgcaggagattgcccgtaaagtggtgctggcactgggcggttatgggttgtttggtgtcgagctatttgtctgtggtgatgaggtgattttcagtgaggtctcccctcgtccacatgataccgggatggtgacgttaatttctcaagatctctcagagtttgccctgcatgtacgtgccttcctcggacttccggttggcgggatccgtcagtatggtcctgcagcttctgccgttattctgccacaactgaccagtcagaatgtcacgtttgataatgtgcagaatgccgtaggcgcagatttgcagattcgtttatttggtaagccggaaattgatggcagccgtcgtctgggggtggcactggctactgcagagagtgttgttgacgccattgaacgcgcgaagcacgccgccggacaggtaaaagtacagggttaa

SEQ ID NO: 371 - DNA, 3888 bp, Escherichia coli
atgatggaaattctgcgtggttcgcctgcactgtcggcattccgaatcaacaaactgctggcacgttttcaggctgccaggctcccggttcacaatatttacgccgagtatgtccattttgctgacctcaatgcgccgttaaacgatgatgagcacgcacaacttgaacgcctgctgaaatatggcccggcactcgccagccacgccccgcaaggcaaactcctgctggtgaccccgcgtcctggcaccatctctccctggtcttcgaaagcgaccgatattgcccataactgcgggctacaacaggtaaaccgccttgagcgcggcgttgcttactatatagaagccggtacgctgaccaatgaacaatggcagcaggttaccgctgaactgcacgaccgcatgatggaaacggtcttttttgctttagatgatgcagagcagttgtttgcccaccatcaaccgactccggttaccagcgttgatttgctggggcagggccgtcaggcgctgatcgacgctaacctgcgtcttggcttggctctggcggaagatgaaattgactatctgcaggatgctttcacaaagcttggtcgtaacccgaacgacatcgaactgtatatgtttgcccaggcgaactccgagcactgccgccacaaaatttttaacgccgactgggttatcgatggtgaacagcagccgaaatcgctgttcaagatgatcaaaaatactttcgaaaccacgccagatcacgttctctctgcttataaagataacgccgccgtaatggaaggttctgaagtgggccgctactttgctgaccacgaaacgggccgctacgatttccatcaggaaccggcgcatattctgatgaaagtcgaaactcacaaccacccgacggcgatttctccgtggccgggcgcggcgaccggttccggcggtgaaatccgcgatgaaggtgccaccgggcgcggcgcaaagccgaaagcgggtctggttggtttctccgtttccaacctgcgaattcctggcttcgaacagccgtgggaagaagatttcggtaagcctgagcgcattgtcaccgcgctggacatcatgaccgaaggcccgctgggcggcgcggcgtttaacaacgaatttggtcgtccggcactgaacggctacttccgtacttatgaagaaaaagtgaacagccacaacggcgaagagctgcgcggttatcacaaaccgatcatgctggcgggcgggatcggcaacattcgcgccgatcacgtacaaaaaggcgagatcaacgtcggtgcgaagctggtcgttctcggcggcccggcaatgaacatcggtcttggcggtggtgcagcgtcttctatggcgtctggtcagtctgatgccgacctcgactttgcttccgtacagcgcgacaacccggagatggagcgtcgctgccaggaagtgatcgaccgttgctggcagcttggtgatgccaacccaatcctgtttatccacgacgttggcgctggcggtctttctaacgccatgccggaactggtgagcgacggcgggcgcggcggtaaatttgaactgcgcgagattctaagcgacgaaccgggcatgagcccgctggaaatctggtgtaacgaatcccaggaacgctacgtgctggcggttgctgccgatcaattaccgctgtttgacgaactgtgtaagcgtgagcgcgcaccctacgcggtgattggtgaagcgaccgaagaactgcatctttctctgcacgatcgtcattttgataatcagccgatcgatctgccgctggacgtcctgcttggtaaaacgccgaagatgacccgcgatgtacaaacgctgaaagcgaaaggcgacgcgctggcccgtgaagggatcaccattgcagacgcggtgaaacgtgtgctgcatctgccgactgtggcggaaaaaaccttcctggtgaccattggcgaccgcagcgtaaccggcatggtagcgcgcgatcagatggtggggccgtggcaggtgccggtcgctaactgcgcggtcactaccgccagcctcgacagctactacggtgaagcgatggcgattggcgagcgtgcgccggttgcgctgctggatttcgccgcctctgcccgtctggcggtcggtgaagcgttaaccaacatcgccgcaacacaaattggcgatatcaaacgcatcaaactttccgccaactggatggcggcggcaggccaccctggtgaagatgcgggcctgtatgaagccgttaaagccgtgggcgaagagctttgtccggcgctgggcctgacgatcccggtgggtaaagactccatgtcgatgaaaacccgctggcaggaaggtaacgaagagcgcgaaatgacgtcgccgctgtcgctggtgatttctgcatttgcccgcgtggaagatgtacgtcacaccatcacgccgcagctttctaccgaagataacgcactgctgctgattgatttgggcaaaggcaataacgcgctgggcgcaacggcgctggcgcaggtttatcgtcagcttggcgacaaaccggcagatgtacgcgatgtcgcgcaactgaaaggcttctatgacgcgattcaggcgctggttgcacagcgtaagctgctggcgtatcacgaccgctctgatggcggcctgctggtaacgctggcggaaatggcctttgctggtcattgtggcattgacgcggatatcgccactctgggtgacgatcgcctggcggcgttgtttaacgaagaactgggtgcggtgattcaggttcgtgccgctgaccgtgaagcggtcgagtccgtactggcacagcatgggcttgctgattgtgtccattatgtagggcaggcggtttccggtgaccgttttgtgattaccgccaacgggcagactgtattcagcgaaagccgcaccacgttgcgtgtctggtgggcagaaactacctggcagatgcagcgcctgcgtgacaacccggagtgtgccgatcaggagcatcaggcgaaatctaacgacgccgatccgggcctgaatgtaaaactgtcgttcgatatcaacgaagatgtggcagcaccgtatattgccactggcgcacgtccgaaagttgccgtactgcgtgagcagggcgtgaactcgcatgttgaaatggcggcagctttccaccgtgcaggctttgatgctatcgacgtgcatatgagtgacctgctgaccggacgcacgggcctggaagatttccacgccctggtcgcgtgcggtggtttctcctacggtgatgtgctgggtgccggtgaaggttgggcgaagtcaatcctgttcaatgaccgtgtacgcgatgagtttgcaaccttcttccaccgtccgcaaacgctggcgctgggggtatgtaacggttgccagatgatgtctaatctgcgtgaactgatcccaggtagtgagttgtggccacgttttgtgcgcaatacctccgatcgctttgaagcgcgtttcagcctggttgaagtaacccaaagcccgtctctgctgttgcaggggatggtgggctcgcaaatgccgattgctgtctctcatggtgaagggcgcgtggaagtgcgtgatgcggcgcatctggcggcactggaaagcaaagggctggtggcactgcgctatgtcgataacttcggcaaagtcactgaaacctacccggctaacccgaacggttcaccgaacggtattacggcagtcacgactgaaagtggtcgagtcaccattatgatgccgcacccggaacgtgttttccgtactgtcagcaactcctggcatccggaaaactggggcgaggatggcccatggatgcgcattttccgcaatgcgcgtaagcagttggggtaa

SEQ ID NO: 372 - DNA, 1038 bp, Escherichia coli
gtgaccgataaaacctctcttagctacaaagatgccggtgttgatattgacgcgggtaatgctctggttggaagaatcaaaggcgtagtgaagaaaacgcgtcgtccggaagtgatgggcggtctgggcggcttcggtgcgctgtgtgcattgccgcaaaaatatcgtgaacccgtgctggtttctggcactgacggcgtaggtaccaagctgcgtctggcaatggacttaaaacgtcacgacaccattggtattgatctggtcgccatgtgcgttaatgacctggtggtgcaaggtgcagagccgctgtttttcctcgactattacgcaaccggaaaactggatgttgataccgcttcagcggtgatcagcggcattgcggaaggttgtctgcaatcaggctgttcactggtgggtggcgaaacggcagaaatgccggggatgtatcacggtgaggattacgatgtcgcgggtttctgcgttggcgtggtagaaaaatcagaaatcatcgacggctctaaagtcagcgacggcgatgtgctgattgcactcggttccagcggtccacactcgaacggctattcgctggtgcgcaaaattcttgaagtcagcggttgtgatccgcaaaccaccgaacttgatggtaagccattagccgatcatctgctggcaccgacccgcatttacgtgaagtcagtgctggagttgattgaaaaggtcgatgtgcatgccattgcgcacctgaccggcggcggcttctgggaaaacattccgcgcgtattgccagataatactcaggcagtgattgatgaatcttcctggcagtggccggaagtgttcaactggctgcaaacggcaggtaacgttgagcaccatgaaatgtatcgcaccttcaactgcggcgtcgggatgattattgccctgcctgctccggaagtggacaaagccctcgccctgctcaatgccaacggtgaaaacgcgtggaaaatcggtatcatcaaagcctctgattccgaacaacgcgtggttatcgaataa

SEQ ID NO: 373 - DNA, 1068 bp, Escherichia coli
atgaaacaggtttgcgtcctcggtaacgggcagttaggccgtatgctgcgtcaggcaggcgaaccgttaggcattgctgtctggccagtcgggctggacgctgaaccggcggcggtgccttttcaacaaagcgtgattaccgctgagatagaacgctggccggaaaccgcattaacccgcgagctggcgcgccatccggcctttgtgaaccgcgatgtgttcccgattattgctgaccgtctgactcagaagcagcttttcgataagctccacctgccgactgcaccgtggcagttacttgccgaacgcagcgagtggcctgcggtgtttgatcgtttaggtgagctggcgattgttaagcgtcgcactggtggttatgacggtcgcggtcaatggcgtttacgcgcaaatgaaaccgaacagttaccggcagagtgttacggcgaatgtattgtcgagcagggcattaacttctctggtgaagtgtcgctggttggcgcgcgcggctttgatggcagcaccgtgttttatccgctgacgcataacctgcatcaggacggtattttgcgcaccagcgtcgcttttccgcaggccaacgcacagcagcaggcgcaagccgaagagatgctgtcggcgattatgcaggagctgggctatgtgggcgtgatggcgatggagtgttttgtcaccccgcaaggtctgttgatcaacgaactggcaccgcgtgtgcataacagcggtcactggacacaaaacggtgccagcatcagccagtttgagctgcatctgcgggcgattaccgatctgccgttaccgcaaccagtggtgaataatccgtcggtgatgatcaatctgattggtagcgatgtgaattatgactggctgaaactgccgctggtgcatctgcactggtacgacaaagaagtccgtccggggcgtaaagtggggcatctgaatttgaccgacagcgacacatcgcgtctgactgcgacgctggaagccttaatcccgctgctgccgccggaatatgccagcggcgtgatttgggcgcagagtaagttcggttaa

SEQ ID NO: 374 - DNA, 510 bp, Escherichia coli
atgtcttcccgcaataatccggcgcgtgtcgccatcgtgatggggtccaaaagcgactgggctaccatgcagttcgccgccgaaatcttcgaaatcctgaatgtcccgcaccacgttgaagtggtttctgctcaccgcacccccgataaactgttcagcttcgccgaaagcgccgaagagaacggttatcaggtgattattgcgggcgcaggcggcgcagcgcatctgccaggcatgattgccgccaaaacgctggtgccggtgctgggcgtgccagtacagagcgccgcactgagcggtgtcgatagcctctactccatcgtacaaatgccgcgcggcattccggtgggtacgctggcgattggtaaagctggcgcggcaaacgcggcgttactggcagcacaaattcttgcgactcatgataaagaactgcaccagcgtctgaatgactggcgcaaagcccagaccgacgaagtgctggaaaacccggacccgcgaggtgcggcatga

SEQ ID NO: 375 - DNA, 714 bp, Escherichia coli
atgcaaaagcaagctgagttgtatcgtggtaaagcgaaaaccgtatacagcacggaaaacccggacctgttggtgctcgaattccgcaatgatacgtcagcaggggatggcgcgcgcattgagcagtttgatcgcaaaggtatggtgaacaacaagttcaactacttcattatgagcaaactggctgaagcgggtatcccgactcaaatggagcgtctgctctccgataccgaatgtctggtgaaaaagctggatatggtgccggttgagtgtgtcgtgcgtaaccgtgctgctggctctctggtgaaacgtcttggaatcgaagaaggtattgagctgaacccgccgctgttcgatctgttcctgaaaaacgacgccatgcacgatccgatggtcaacgaatcttactgcgaaacctttggctgggtgagcaaagagaacctggcgcgtatgaaagagctgacctacaaagcgaacgacgtgctgaaaaaactgttcgatgatgctggtctgattctggtcgacttcaagctggaatttggtctgtacaaaggcgaagtggtactgggtgatgagttctccccggacggtagccgcctgtgggacaaagaaacgctggagaaaatggacaaagaccgtttccgccagagcctcggtggcctgatcgaagcctatgaagccgtcgcccgccgcctgggtgtacagctggactga

SEQ ID NO: 376 - DNA, 1371 bp, Escherichia coli
atggaattatcctcactgaccgccgtttcccctgtcgatggacgctacggcgataaagtcagcgcgctgcgcgggattttcagcgaatatggtttgctgaaattccgtgtacaagttgaagtacgttggctgcaaaaactggccgcgcacgcagcgatcaaggaagttcctgcttttgctgccgacgcaatcggttaccttgatgcaatcgtcgccagtttcagcgaagaagatgcggcgcgcatcaaaactatcgagcgtaccactaaccacgacgttaaagcggttgagtatttcctgaaagaaaaagtggcggagatcccggaactgcacgcggtttctgaattcatccactttgcctgtacttcggaagatatcaataacctctcccacgcattaatgctgaaaaccgcgcgtgatgaagtgatcctgccatactggcgtcaactgattgatggcattaaagatctcgccgttcagtatcgcgatatcccgctgctgtctcgtacccacggtcagccagccacgccgtcaaccatcggtaaagagatggcaaacgtcgcctaccgtatggagcgccagtaccgccagcttaaccaggtggagatcctcggcaaaatcaacggcgcggtcggtaactataacgcccacatcgccgcttacccggaagttgactggcatcagttcagcgaagagttcgtcacctcgctgggtattcagtggaacccgtacaccacccagatcgaaccgcacgactacattgccgaactgtttgattgcgttgcgcgcttcaacactattctgatcgactttgaccgtgacgtctggggttatatcgcccttaaccacttcaaacagaaaaccattgctggtgagattggttcttccaccatgccgcataaagttaacccgatcgacttcgaaaactccgaagggaatctgggcctttccaacgcggtattgcagcatctggcaagcaaactgccggtttcccgctggcagcgtgacctgaccgactctaccgtgctgcgtaacctcggcgtgggtatcggttatgccttgattgcatatcaatccaccctgaaaggcgtgagcaaactggaagtgaaccgtgaccatctgctggatgaactggatcacaactgggaagtgctggctgaaccaatccagacagttatgcgtcgctatggcatcgaaaaaccgtacgagaagctgaaagagctgactcgcggtaagcgcgttgacgccgaaggcatgaagcagtttatcgatggtctggcgttgccagaagaagagaaagcccgcctgaaagcgatgacgccggctaactatattggtcgagctatcacgatggttgatgagctgaaataa

SEQ ID NO: 377 - DNA, 1590 bp, Escherichia coli
atgcaacaacgtcgtccagtccgccgcgctctgctcagtgtttctgacaaagccggtatcgtcgaattcgcccaggcactttccgcacgcggtgtggagctgctgtctacagggggcactgcccgtctgttagcagaaaaaggtctgccggtaaccgaagtttccgattacaccggtttcccggagatgatggatggacgcgtgaagaccctgcatccgaaagtacatggtggcattctgggccgtcgcggccaggacgatgccattatggaagaacatcagatccagcctatcgatatggtggttgttaacctgtatccgttcgcccagaccgtggcccgtgaaggttgctcgctggaagatgcggttgagaacatcgatatcggcggcccaacgatggtgcgctccgccgccaagaaccataaagatgtcgcaatcgtggtgaagagcagcgactatgacgccattattaaagagatggatgacaacgaaggatcgctgacgcttgcaacccgtttcgacctcgccatcaaagccttcgaacacactgccgcctacgacagcatgattgccaactacttcggcagcatggttccggcttaccacggtgaaagcaaagaagccgccggtcgcttcccacgcacgctgaacctgaacttcattaagaagctggatatgcgttacggcgagaacagccaccagcaggctgccttctatatagaagagaatgtgaaagaagcctccgttgctaccgcaacccaggttcagggtaaagccctctcttataacaacatcgccgataccgatgcggcgctggagtgcgtgaaagagttcgccgagccggcatgtgtgattgtgaagcacgccaacccttgcggcgtggctatcggcaattccattcttgatgcttacgatcgcgcgtacaaaaccgacccaacctccgcattcggcggcatcattgcctttaaccgcgagctggatgcggaaaccgcacaggccatcatttctcgtcagtttgtcgaagtgattattgcgccgtccgccagcgaagaagccctgaaaatcaccgccgccaaacagaacgtacgcgttctgacctgcggtcagtggggcgagcgtgttccgggcctcgatttcaaacgcgtgaacggcggtctgctggttcaggatcgtgacctggggatggtcggtgcggaagaactgcgcgtggtgaccaaacgtcagccgagcgaacaggaactgcgtgatgcgctgttctgctggaaggtggcgaagtttgtgaaatccaacgctatcgtctatgccaaaaacaatatgactatcggcattggcgcgggccagatgagccgcgtgtactccgcaaaaatcgccggtattaaagcggccgatgaaggcctggaagtgaaaggttcctcgatggcttctgacgcgttcttcccgttccgcgacggtattgatgccgccgccgctgcgggcgtgacctgcgtaatccagcctggcggttctatccgtgatgacgaagtgattgccgccgccgacgagcacggtattgcgatgctcttcaccgacatgcgccacttccgccattaa

SEQ ID NO: 378 - DNA, 1467 bp, Escherichia coli
atgctacgtatcgctaaagaagctctgacgtttgacgacgttctcctcgttcctgctcactctaccgttctgccgaatactgctgacctcagcacccagctgacgaaaactattcgtctgaatatccctatgctttccgcagcaatggataccgtaacggaagcgcgcctggctattgctctggctcaggaaggcggtatcggctttatccacaaaaacatgtccattgaacgccaggcagaagaagttcgccgtgtgaaaaaacacgaatctggtgtggtgactgatccgcagactgttctgccaaccacgacgctgcgcgaagtgaaagaactgaccgagcgtaacggttttgcgggctatccggtcgttaccgaagaaaacgaactggtgggtattatcaccggtcgtgacgtgcgttttgttaccgacctgaaccagccggttagcgtttacatgacgccgaaagagcgtctggtcaccgtgcgtgaaggtgaagcccgtgaagtggtgctggcaaaaatgcacgaaaaacgcgttgaaaaagcgctggtggttgatgacgaattccacctgatcggcatgatcaccgtgaaagacttccagaaagcggaacgtaaaccgaacgcctgtaaagacgagcaaggccgtctgcgtgttggtgcagcggttggcgcaggtgcgggtaacgaagagcgtgttgacgcgctggttgccgcaggcgttgacgttctgctgatcgactcctcccacggtcactcagaaggtgtactgcaacgtatccgtgaaacccgtgctaaatatccggatctgcaaattatcggcggcaacgtggcaacagctgcaggtgcacgcgctctggcagaagctggttgcagtgcggttaaagtcggcattggccctggctctatctgtacaactcgtatcgtgactggcgtcggtgttccgcagattaccgctgttgctgacgcagtagaagccctggaaggcaccggtattccggttatcgctgatggcggtattcgcttctccggcgacatcgccaaagctatcgccgctggcgcaagcgcggtgatggtaggttccatgctggcgggtactgaagaatctccgggtgaaatcgaactctaccagggccgttcttacaaatcttaccgtggtatgggttccctgggcgcgatgtccaaaggttcctctgaccgttatttccagagcgataacgctgccgacaaactggtgccggaaggtatcgaaggtcgcgtagcctataaaggtcgcctgaaagagatcattcaccagcagatgggcggcctgcgctcctgtatgggtctgaccggctgtggtactatcgacgaactgcgtactaaagcggagtttgtacgtatcagcggtgcgggcattcaggaaagccacgttcacgacgtgaccattactaaagagtccccgaactaccgtctgggctcctga

SEQ ID NO: 379 - DNA, 1578 bp, Escherichia coli
atgacggaaaacattcataagcatcgcatcctcattctggacttcggttctcagtacactcaactggttgcgcgccgcgtgcgtgagctgggtgtttactgcgaactgtgggcgtgggatgtgacagaagcacaaattcgtgacttcaatccaagcggcattattctttccggcggcccggaaagtactactgaagaaaacagtccgcgtgcgccgcagtatgtctttgaagcaggcgtaccggtattcggcgtttgctatggcatgcagaccatggcaatgcagttgggcggtcacgttgaagcctctaacgaacgtgaatttggctacgcgcaggttgaagtcgtaaacgacagcgcactggttcgcggtatcgaagatgcgctgaccgcagacggtaaaccgctgctcgatgtctggatgagccacggcgataaagttaccgctattccgtccgacttcatcaccgtagccagcaccgaaagctgcccgtttgccattatggctaacgaagaaaaacgcttctatggcgtacagttccacccggaagtgactcatacccgccagggtatgcgcatgctggagcgttttgtgcgtgatatctgccagtgtgaagccctgtggacgccagcgaaaattatcgacgatgctgtagctcgcatccgcgagcaggtaggcgacgataaagtcatcctcggcctctctggtggtgtggattcctccgtaaccgcaatgctgctgcaccgcgctatcggtaaaaacctgacttgcgtattcgtcgacaacggcctgctgcgcctcaacgaagcagagcaggttctggatatgtttggcgatcactttggtcttaacattgttcacgtaccggcagaagatcgcttcctgtcagcgctggctggcgaaaacgatccggaagcaaaacgtaaaatcatcggtcgcgttttcgttgaagtattcgatgaagaagcgctgaaactggaagacgtgaagtggctggcgcagggcaccatctaccctgacgttatcgaatctgcggcgtctgcaaccggtaaagcacacgtcatcaaatctcaccacaacgtgggcggcctgccgaaagagatgaagatgggcctggttgaaccgctgaaagagctgttcaaagacgaagtgcgtaagattggtctggagctgggcctgccgtacgacatgctgtaccgtcacccgttcccgggaccaggccttggcgttcgtgttctgggtgaagtgaagaaagagtactgtgacctgctgcgccgtgctgacgccatcttcattgaagaactgcgtaaagcggacctgtacgacaaagtcagccaggcgttcactgtgttcctgccggtacgttccgttggcgtaatgggcgatggtcgtaagtatgactgggttgtctctctgcgtgctgtcgaaaccatcgactttatgaccgcacactgggcgcatctgccgtacgatttcctcggtcgcgtttccaaccgcattatcaatgaagtgaacggtatttcccgcgtggtgtatgacatcagcggcaagccgccagctaccattgagtgggaatga

SEQ ID NO: 380 - DNA, 624 bp, Escherichia coli
atggctcaaggcacgctttatattgtttctgcccccagtggcgcgggtaaatccagcctgattcaggctttattaaaaacccaaccgttgtatgacacccaggtttctgtttcacacaccacacgccaaccgcgtcctggtgaagtccacggtgaacattatttctttgttaatcatgatgaatttaaagaaatgattagcagagatgcgttcctcgaacacgcagaagtttttggtaattactatggcacttcgcgtgaggccattgagcaagtactggcgaccggtgtcgatgtttttctcgatatcgactggcagggcgcgcagcaaattcgccagaagatgccgcacgcgcggagtatctttattttaccgccgtccaaaattgaactggaccgccgtctacgcggtcgcggtcaggacagcgaagaggtcattgcaaagcgtatggcgcaagctgttgcagaaatgagccattacgccgaatatgattatctgattgtgaatgatgacttcgataccgcgttgaccgatttgaagaccattattcgcgccgaacgtctgcgcatgagccgccaaaagcagcgtcatgacgctttaatcagcaaattgttggcagactga

SEQ ID NO: 381 - DNA, 432 bp, Escherichia coli
atggctattgaacgtactttttccatcatcaaaccgaacgcggtagcaaaaaacgtcattggtaatatctttgcgcgctttgaagctgcagggttcaaaattgttggcaccaaaatgctgcacctgaccgttgaacaggcacgtggcttttatgctgaacacgatggaaaaccgttctttgatggtctggttgaattcatgacctctggcccgatcgtggtttccgtgctggaaggtgaaaacgccgttcagcgtcaccgcgatctgctgggcgcgaccaatccggcaaacgcactggctggtactctgcgcgctgattacgctgacagcctgaccgaaaacggtacccacggttctgattccgtcgaatctgccgctcgcgaaatcgcttatttctttggcgaaggcgaagtgtgcccgcgcacccgttaa

SEQ ID NO: 382 - DNA, 2286 bp, Escherichia coli
atgaatcagaatctgctggtgacaaagcgcgacggtagcacagagcgcatcaatctcgacaaaatccatcgcgttctggattgggcggcagaaggactgcataacgtttcgatttcccaggtcgagctgcgctcccacattcagttttatgacggtatcaagacctctgacatccacgaaaccattatcaaggctgccgcagacctgatctcccgtgatgcgccggattatcagtatctcgccgcgcgcctggcgatcttccacctgcgtaaaaaagcctacggccagtttgagccgcctgcgctgtacgaccacgtggtgaaaatggtcgagatgggcaaatacgataatcatctgctggaagactacacggaagaagagttcaagcagatggacacctttatcgatcacgaccgtgatatgaccttctcttatgctgccgttaagcagctggaaggcaaatatctggtacagaaccgcgtgaccggcgaaatctatgagagcgcccagttcctttatattctagttgccgcgtgcttgttctcgaactacccgcgtgaaacgcgcctgcaatatgtgaagcgtttttacgacgcggtttccacatttaaaatttcgctgccgacgccaatcatgtccggcgtgcgtaccccgactcgtcagttcagctcctgcgtactgatcgagtgcggtgacagcctggattccatcaacgccacctccagcgcgattgttaaatacgtttcccagcgtgccgggatcggcatcaacgccgggcgtattcgtgcgctgggtagcccgattcgcggtggtgaagcgttccataccggctgcattccgttctacaaacatttccagacagcggtgaaatcctgctctcagggcggtgtgcgcggcggtgcggcaacgctgttctacccgatgtggcatctggaagtggaaagcctgctggtgttgaaaaacaaccgtggtgtggaaggcaaccgcgtgcgtcatatggactacggggtacaaatcaacaaactgatgtatacccgtctgctgaaaggtgaagatatcaccctgttcagcccgtccgacgtaccggggctgtacgacgcgttcttcgccgatcaggaagagtttgaacgtctgtataccaaatatgagaaagacgacagcatccgcaagcagcgtgtgaaagccgttgagctgttctcgctgatgatgcaggaacgtgcgtctaccggtcgtatctatattcagaacgttgaccactgcaatacccatagcccgtttgatccggccatcgcgccagtgcgtcagtctaacctgtgcctggagatagccctgccgaccaaaccgctgaacgacgtcaacgacgagaacggtgaaatcgcgctgtgtacgctgtctgctttcaacctgggcgcaattaataacctggatgaactggaagagctggcaattctggcggttcgtgcacttgacgcgctgctggattatcaggattacccgatcccggccgccaaacgtggagcgatgggtcgtcgtacgctgggtattggtgtgatcaacttcgcttactacctggcgaagcacggtaaacgctactccgacggcagcgccaacaacctgacgcataaaaccttcgaagccattcagtattacctgctgaaagcctctaatgagctggcgaaagagcaaggcgcgtgcccgtggtttaacgaaaccacttacgcgaaagggatcctgccgatcgatacctataagaaagatctggataccatcgctaatgagccgctgcattacgactgggaagctctgcgtgagtcaatcaaaacgcacggtctgcgtaactccacgctttctgctctgatgccgtccgagacttcttcgcagatctctaacgccactaacggtattgaaccgccgcgcggttacgtcagcatcaaagcgtcgaaagacggtattttgcgccaggtggtgccggactacgagcacctgcacgacgcctatgagctgctgtgggaaatgccgggtaacgatggttatctgcaactggtgggtatcatgcagaaatttatcgatcagtcgatctctgccaacaccaactacgatccgtcacgcttcccgtcaggaaaagtgccgatgcagcagttgctgaaagacctgctcaccgcctacaaattcggggtcaaaacactgtattatcagaacacccgtgacggcgctgaagacgcacaagacgatctggtgccgtcaatccaggacgatggctgcgaaagcggcgcatgtaagatctga

SEQ ID NO: 383 - DNA, 1131 bp, Escherichia coli
atggcatataccaccttttcacagacgaaaaatgatcagctcaaagaaccgatgttctttggtcagccggtcaacgtggctcgctacgatcagcaaaaatatgacatcttcgaaaagctgatcgaaaagcagctctctttcttctggcgtccggaagaagttgacgtctcccgcgaccgtatagattaccaggcgctgccggagcacgaaaaacacatctttatcagcaacctgaaatatcagacgctgctggattccattcagggtcgtagcccgaacgtggcgctattgccgcttatttctattccggaactggaaacctgggtcgaaacctgggcgttctcagaaacgattcattcccgttcctatactcatatcattcgtaatatcgttaacgatccgtctgttgtgtttgacgatatcgtcaccaacgagcagatccagaaacgtgcggaagggatctccagctattacgatgagctgatcgaaatgaccagctactggcatctgctgggcgaaggtacccacaccgttaacggtaaaactgtgaccgttagcctgcgcgagctgaagaaaaaactgtatctctgcctgatgagcgttaacgcgctggaagcgattcgtttctacgtcagctttgcttgttccttcgcatttgcagaacgcgaattgatggaaggcaacgccaaaattattcgcctgattgcccgcgacgaagccctgcacctgaccggcacccagcatatgctgaatctgctgcgcagcggcgcggacgatcctgagatggcggaaattgccgaagagtgtaagcaggagtgctatgacctgtttgttcaggcagctcaacaggagaaagactgggcggattatctgttccgcgacggttcgatgattggtctgaataaagacattctctgccagtacgttgaatacatcaccaatatccgtatgcaggcagtcggtttggatctgccgttccagacgcgctccaacccgatcccgtggatcaacacttggctggtgtctgataacgtgcaggttgctccgcaggaagtggaagtcagttcttatctggtcgggcagattgactcggaagtggacaccgacgatttgagtaacttccagctctga

SEQ ID NO: 384 - DNA, 2139 bp, Escherichia coli
atgacaccgcatgtgatgaaacgagacggctgcaaagtgccgtttaaatcagagcgcatcaaagaagcgattctgcgtgcagctaaagcagcggaagtcgatgatgccgattattgcgccactgttgccgcggttgtcagcgagcagatgcagggccgcaaccaggtggatatcaatgagatccagaccgcagttgaaaatcagctgatgtcaggtccatacaaacaactggctcgtgcttacatcgagtaccgtcacgatcgcgacattgaacgtgaaaaacgcggtcgcctgaaccaggagatccgtggtctggtcgagcagaccaacgcctcgttactcaacgaaaacgccaacaaagacagcaaggtgattccaacccagcgcgacctgctggccgggatcgtggctaaacactatgcacgtcagcacctgctgccgcgtgacgtggtgcaggcacatgagcgtggcgatattcactatcacgatctcgattactcaccgttcttcccgatgttcaactgcatgttgatcgacctgaaaggcatgctgacccagggctttaaaatggggaacgccgagattgaaccgccgaagtcgatctctacggcaaccgcggtaactgcgcagattattgctcaggttgccagccatatttatggcggcaccaccattaaccgtatcgatgaagtgctggcaccgtttgtcactgccagctacaacaaacatcgcaagaccgcagaagagtggaacatcccggacgccgaaggctacgctaactctcgaaccatcaaagagtgctacgatgccttccagtcactggagtacgaagtaaacaccctgcacaccgccaacggtcagacgccgtttgtaacctttggttttggcctgggcaccagctgggaatcgcgcctgattcaggaatcgatcctgcgtaaccgtatcgcaggcctcggtaaaaaccgtaaaactgcggtgttcccgaaactggtgtttgcgattcgcgatggcctgaaccataaaaaaggcgatccgaactacgacatcaaacagctggcgctggagtgcgcaagcaagcgcatgtatccggatatcctgaactacgatcaggtagtgaaagtcaccggttcgtttaaaactccgatgggctgccgcagcttcctcggcgtgtgggaaaatgaaaacggcgagcagatccacgatggtcgtaacaacctcggcgtgatcagcctgaacctgccgcgtattgctctggaagcaaaaggcgatgaagccaccttctggaagctgctggatgaacgtctggtgctggcacgtaaggcgctgatgacccgtatcgctcgtctcgaaggcgtgaaagcgcgcgtggccccgatcctctatatggaaggtgcttgtggcgtgcgtctcaatgctgacgatgatgtttctgaaatcttcaaaaacggtcgtgcgtctatttcgctgggttacatcggcatccacgaaaccattaacgcgctgttcggcggcgagcatgtttacgacaacgagcagcttcgcgcgaaaggtatcgccattgttgaacgtctgcgtcaggcagtggatcagtggaaagaagaaacgggttatggtttcagtctctacagcacgccgagtgaaaacctgtgcgatcgcttctgccgtctcgatactgctgagtttggcgtggtgccgggcgtgaccgataaaggttactacaccaacagtttccacctcgatgtggagaagaaggtgaacccgtacgacaagatcgactttgaagcgccttacccgccgctggcgaacggtggtttcatttgctacggcgagtatccaaacattcagcacaacctgaaggcgctggaagatgtctgggattacagctatcagcatgtaccgtattacggcaccaatacaccgattgatgagtgctacgagtgtggctttaccggtgagttcgagtgcaccagcaaaggcttcacttgcccgaaatgtggtaaccatgacgcctcccgtgtgtcggtaactcgccgcgtgtgcggatatttaggtagcccggatgcacgtccgtttaacgctggtaagcaggaagaagttaagcgccgcgttaaacatttggggaatgggcagataggttaa

SEQ ID NO: 385 - DNA, 645 bp, Escherichia coli
atgcgtatcattctgcttggcgctccgggcgcggggaaagggactcaggctcagttcatcatggagaaatatggtattccgcaaatctccactggcgatatgctgcgtgctgcggtcaaatctggctccgagctgggtaaacaagcaaaagacattatggatgctggcaaactggtcaccgacgaactggtgatcgcgctggttaaagagcgcattgctcaggaagactgccgtaatggtttcctgttggacggcttcccgcgtaccattccgcaggcagacgcgatgaaagaagcgggcatcaatgttgattacgttctggaattcgacgtaccggacgaactgatcgttgaccgtatcgtcggtcgccgcgttcatgcgccgtctggtcgtgtttatcacgttaaattcaatccgccgaaagtagaaggcaaagacgacgttaccggtgaagaactgactacccgtaaagatgatcaggaagagaccgtacgtaaacgtctggttgaataccatcagatgacagcaccgctgatcggctactactccaaagaagcagaagcgggtaataccaaatacgcgaaagttgacggcaccaagccggttgctgaagttcgcgctgatctggaaaaaatcctcggctaa

SEQ ID NO: 386 - DNA, 960 bp, Escherichia coli
atgaaactctcacgtatcagcgccatcaactggaacaagatatctgacgataaagatctggaggtgtggaatcgcctgaccagcaatttctggctaccagaaaaggtgccgctgtcgaacgatattcctgcctggcagacattaactgtcgtagaacaacaactgacgatgcgcgtttttactggcctgacgctgctcgacacgctgcaaaatgttatcggcgcgccttctctgatgcccgatgcactcacgcctcatgaagaagcggtattatcgaatatcagctttatggaagcggttcatgcccgctcttacagttcgattttctcgacgctatgccagaccaaagatgtcgatgccgcctacgcctggagtgaagaaaacgcaccgttgcagcgaaaagctcagattattcagcaacattatcgcggtgatgatccgctgaaaaagaaaatcgccagtgtgtttcttgaatcttttttgttctattccggtttctggctgccgatgtatttttccagccgcggaaagctgaccaataccgcggacctgatccgtctgattatccgcgatgaagcagtccacggttactacataggctataaatatcagaaaaacatggaaaagatatctctgggacaacgtgaagagttgaagagtttcgccttcgatttgttgctggaactctacgacaacgagttgcaatacaccgatgagctgtacgccgaaaccccgtgggctgacgatgtgaaagcgtttctctgttacaacgccaataaggctttgatgaatctgggctacgaaccgttatttcccgcagaaatggcggaagtgaatccggcaatcctcgccgcgctttcgccgaatgccgatgaaaatcacgatttcttttccggttcaggctcctcttatgtgatggggaaagcggttgaaacagaagatgaagactggaatttctga

SEQ ID NO: 387 - DNA, 2145 bp, Escherichia coli
ttggcaacgacaaccgcagaatgcctgacgcaggaaacgatggattaccacgcgctgaatgcgatgcttaacctctacgatagcgcaggtcgcattcagttcgataaagaccgccaggccgttgacgcctttattgcgacgcatgtgcgtccgaacagtgtgaccttcagtagccagcagcagcgcctgaactggctggtcaacgaaggttactatgatgaaagcgttcttaatcgctactctcgcgactttgtcattacgctgtttacccacgcacacaccagcggttttcgtttccagacattcctcggggcatggaagttttacaccagctatacgttgaagacattcgacggtaaacgttatctggaagattttgccgatcgagtaacgatggtggcgctgacgctggcacaaggcgatgagacgctggcgttgcaactgaccgatgaaatgctgtcaggacgctttcagccagccacgccaacattcctcaactgcggtaagcagcagcgcggcgaactggtttcctgttttttgctgcgtattgaagacaatatggagtcgattggtcgggcggtaaattccgcactgcagctgtcgaaacgcggcggcggcgtagcatttttgctgtcgaatctgcgagaagcgggcgcgccaattaaacgtattgaaaatcaatcttctggcgtaattccggtgatgaaaatgctggaagacgcattttcctatgccaaccaactcggcgctcgtcagggggctggtgcagtctatttacatgctcatcatcccgatattctgcgttttctcgacacgaaacgggaaaatgccgacgaaaaaatccgcattaaaacactgtcgcttggcgtggtgatcccggatatcactttccatctggcaaaagagaatgcgcagatggcgctgttttcgccttatgacgtagagcgagtttatggcaagccgtttgccgatgtggccatcagccaacactatgacgaactggttgccgatgaacgcattcgcaaaaaatacctcaacgcccgtgatttcttccagcgactggcagaaatccagtttgagtccggctatccctacatcatgtatgaagacacggtaaaccgtgctaaccctatcgccgggcgcataaatatgagtaatctctgctcagaaattttgcaggttaacagcgcctcagagtatgacgagaatctcgactatacccgcacaggccatgatatttcctgcaatttaggttcgttgaatattgcgcacaccatggattcccccgattttgcccgcacggtagagactgccgtgcgcggtttaacggcagtatcagatatgagtcatatccgcagcgtgccgtccatcgaagccggaaatgccgcctcgcacgccatcggactggggcagatgaatttacacggctatctggcgcgagaaggcatcgcttatggttcgccggaagcactggatttcaccaatctctatttctatgccatcacctggcatgcactgcgtacctcgatgttgctggcacgcgaacgcggtgaaaccttcgccgggttcaaacagtcacgctatgccagtggtgaatattttagccaatatctgcaagggaactggcagccgaaaacggcgaaagttggcgaactgtttacccgtagcggtattacgttacctacccgtgagatgtgggcgcagctgcgcgacgacgtgatgcgctacggcatatacaaccagaatcttcaggcggtgccgccaaccggttctatctcttatatcaaccatgctacgtcgagtattcatccgattgtggcgaaagtagagatacgcaaagagggcaaaacaggacgcgtttactaccctgccccgtttatgactaacgagaatctggcgctgtatcaggacgcttacgaaattggcgcagaaaagatcatcgacacctacgcggaagcgactcgccatgtcgatcaggggctgtcgctgacgctttttttccccgataccgccaccactcgcgatatcaacaaagcgcagatttacgcctggcgcaagggtatcaaaacgctctattacatccgcctgcgtcagatggcgctggaaggcactgaaattgaaggctgcgtctcctgtgcactttaa

SEQ ID NO: 388 - DNA, 1299 bp, Escherichia coli
atgggtaacaacgtcgtcgtactgggcacccaatggggtgacgaaggtaaaggtaagatcgtcgatcttctgactgaacgggctaaatatgttgtacgctaccagggcggtcacaacgcaggccatactctcgtaatcaacggtgaaaaaaccgttctccatcttattccatcaggtattctccgcgagaatgtaaccagcatcatcggtaacggtgttgtgctgtctccggccgcgctgatgaaagagatgaaagaactggaagaccgtggcatccccgttcgtgagcgtctgctgctgtctgaagcatgtccgctgatccttgattatcacgttgcgctggataacgcgcgtgagaaagcgcgtggcgcgaaagcgatcggcaccaccggtcgtggtatcgggcctgcttatgaagataaagtagcacgtcgcggtctgcgtgttggcgaccttttcgacaaagaaaccttcgctgaaaaactgaaagaagtgatggaatatcacaacttccagttggttaactactacaaagctgaagcggttgattaccagaaagttctggatgatacgatggctgttgccgacatcctgacttctatggtggttgacgtttctgacctgctcgaccaggcgcgtcagcgtggcgatttcgtcatgtttgaaggtgcgcagggtacgctgctggatatcgaccacggtacttatccgtacgtaacttcttccaacaccactgctggtggcgtggcgaccggttccggcctgggcccgcgttatgttgattacgttctgggtatcctcaaagcttactccactcgtgtaggtgcaggtccgttcccgaccgaactgtttgatgaaactggcgagttcctctgcaagcagggtaacgaattcggcgcaactacggggcgtcgtcgtcgtaccggctggctggacaccgttgccgttcgtcgtgcggtacagctgaactccctgtctggcttctgcctgactaaactggacgttctggatggcctgaaagaggttaaactctgcgtggcttaccgtatgccggatggtcgcgaagtgactaccactccgctggcagctgacgactggaaaggtgtagagccgatttacgaaaccatgccgggctggtctgaatccaccttcggcgtgaaagatcgtagcggcctgccgcaggcggcgctgaactatatcaagcgtattgaagagctgactggtgtgccgatcgatatcatctctaccggtccggatcgtactgaaaccatgattctgcgcgacccgttcgacgcgtaa

SEQ ID NO: 389 - DNA, 462 bp, Escherichia coli
atgacacacgataataaattgcaggttgaagctattaaacgcggcacggtaattgaccatatccccgcccagatcggttttaagctgttgagtctgttcaagctgaccgaaacggatcagcgcatcaccattggtctgaacctgccttctggcgagatgggccgcaaagatctgatcaaaatcgaaaatacctttttgagtgaagatcaagtagatcaactggcattgtatgcgccgcaagccacggttaaccgtatcgacaactatgaagtggtgggtaaatcgcgcccaagtctgccggagcgcatcgacaatgtgctggtctgcccgaacagcaactgtatcagccatgccgaaccggtttcatccagctttgccgtgcgaaaacgcgccaatgatatcgcgctcaaatgcaaatactgtgaaaaagagttttcccataatgtggtgctggccaattaa

SEQ ID NO: 390 - DNA, 936 bp, Escherichia coli; identical to SEQ ID NO: 297

SEQ ID NO: 391 - DNA, 1047 bp, Escherichia coli
atgactgcaccatcccaggtattaaagatccgccgcccagacgactggcaccttcacctccgcgatggcgacatgttaaaaactgtcgtgccatataccagcgaaatttatggacgggctatcgtaatgcccaatctggctccgcccgtgaccaccgttgaggctgccgtggcgtatcgccagcgtattcttgacgccgtacctgccgggcacgatttcaccccattgatgacctgttatttaacagattcgctggatcctaatgagctggagcgcggatttaacgaaggcgtgttcaccgctgcaaaactttacccggcaaacgcaaccactaactccagccacggcgtgacgtcaattgacgcaatcatgccggtacttgagcgcatggaaaaaatcggtatgccgctactggtgcatggtgaagtgacacatgcagatatcgacatttttgatcgtgaagcgcgctttatagaaagcgtgatggaacctctgcgccagcgcctgactgcgctgaaagtcgtttttgagcacatcaccaccaaagatgctgccgactatgtccgtgacggaaatgaacggctggctgccaccatcactccgcagcatctgatgtttaaccgcaaccatatgctggttggaggcgtgcgtccgcacctgtattgtctacccatcctcaaacgtaatattcaccaacaggcattgcgtgaactggtcgccagcggttttaatcgagtattcctcggtacggattctgcgccacatgcacgtcatcgcaaagagagcagttgcggctgcgcgggctgcttcaacgccccaaccgcgctgggcagttacgctaccgtctttgaagaaatgaatgctttgcagcactttgaagcattctgttctgtaaacggcccgcagttctatgggttgccggtcaacgacacattcatcgaactggtacgtgaagagcaacaggttgctgaaagcatcgcactgactgatgacacgctggtgccattcctcgccggggaaacggtacgctggtccgttaaacaataa

SEQ ID NO: 392 - DNA, 1011 bp, Escherichia coli
atgtactaccccttcgttcgtaaagcccttttccagctcgatccagagcgcgctcatgagtttacttttcagcaattacgccgtattacaggaacgccgtttgaagcactggtgcggcagaaagtgcctgcgaaacctgttaactgcatgggcctgacgtttaaaaatccgcttggtctggcagccggtcttgataaagacggggagtgcattgacgcgttaggcgcgatgggatttggatcgatcgagatcggtaccgtcacgccacgtccacagccaggtaatgacaagccgcgtctctttcgtctggtagatgccgaaggtttgatcaaccgtatgggctttaataatcttggcgttgataacctcgtagagaacgtaaaaaaggcccattatgacggcgtcctgggtattaacatcggcaaaaataaagatacgccagtggagcagggcaaagatgactatctgatttgtatggaaaaaatctatgcctatgcgggatatatcgccatcaatatttcatcgccgaataccccaggattacgcacgctgcaatatggtgaagcgctggatgatctcttaaccgcgattaaaaataagcaaaatgatttgcaagcgatgcaccataaatatgtgccgatcgcagtgaagatcgcgccggatctttctgaagaagaattgatccaggttgccgatagtttagttcgccataatattgatggcgttattgcaaccaataccacactcgatcgttctcttgttcagggaatgaaaaattgcgatcaaaccggtggcttaagtggtcgtccgcttcagttaaaaagcaccgaaattattcgccgcttgtcactggaattaaacggtcgcttaccgatcatcggtgttggcggcatcgactcggttatcgctgcgcgtgaaaagattgctgcgggtgcctcactggtgcaaatttattctggttttatttttaaaggtccgccgctgattaaagaaatcgttacccatatctaa

SEQ ID NO: 393 - DNA, 642 bp, Escherichia coli
atgaaaccatatcagcgccagtttattgaatttgcgcttagcaagcaggtgttaaagtttggcgagtttacgctgaaatccgggcgcaaaagcccctatttcttcaacgccgggctgtttaataccgggcgcgatctggcactgttaggccgtttttacgctgaagcgttggtggattccggcattgagttcgatctgctgtttggccctgcttacaaagggatcccgattgccaccacaaccgctgtggcactggcggagcatcacgacctggacctgccgtactgctttaaccgcaaagaagcaaaagaccacggtgaaggcggcaatctggttggtagcgcgttacaaggacgcgtaatgctggtagatgatgtgatcaccgccggaacggcgattcgcgagtcgatggagattattcaggccaatggcgcgacgcttgctggcgtgttgatttcgctcgatcgtcaggaacgcgggcgcggcgagatttcggcgattcaggaagttgagcgtgattacaactgcaaagtgatctctatcatcaccctgaaagacctgattgcttacctggaagagaagccggaaatggcggaacatctggcggcggttaaggcctatcgcgaagagtttggcgtttaa

SEQ ID NO: 394 - DNA, 738 bp, Escherichia coli
atgacgttaactgcttcatcttcttcccgcgctgttacgaattctcctgtggttgttgcccttgattatcataatcgtgatgacgcgctggcctttgtcgacaagatcgacccacgcgattgtcgtctgaaggtcggcaaagagatgtttacattgtttgggccacagtttgtgcgcgaacttcaacagcgtggttttgatatctttcttgacctgaaattccacgatatccccaacactgcagcgcacgctgtcgctgctgcagctgacttaggcgtgtggatggtgaatgttcatgcctctggtggggcgcgtatgatgaccgcagcgcgtgaggcactggttccgtttggcaaagatgcaccgcttttgattgctgtgacagtgttgaccagcatggaagccagcgacctggtcgatcttggcatgacactgtcacctgcagattatgcagaacgtctggcggcactgacgcaaaaatgtggccttgatggtgtggtgtgttctgctcaggaagctgtgcgctttaaacaggtattcggtcaggagttcaaactggttacgccgggcattcgtccgcaggggagtgaagctggtgaccagcgccgcattatgacgccagaacaggcgttgtcggctggtgttgattatatggtgattggtcgcccggtaacgcaatcggtagatccagcgcagacgctgaaagcgatcaacgcctctttacagcggagtgcatga

SEQ ID NO: 395 - DNA, 726 bp, Escherichia coli
atggctaccaatgcaaaacccgtctataaacgcattctgcttaagttgagtggcgaagctctgcagggcactgaaggcttcggtattgatgcaagcatactggatcgtatggctcaggaaatcaaagaactggttgaactgggtattcaggttggtgtggtgattggtgggggtaacctgttccgtggcgctggtctggcgaaagcgggtatgaaccgcgttgtgggcgaccacatggggatgctggcgaccgtaatgaacggcctggcaatgcgtgatgcactgcaccgcgcctatgtgaacgctcgtctgatgtccgctattccattgaatggcgtgtgcgacagctacagctgggcagaagctatcagcctgttgcgcaacaaccgtgtggtgatcctctccgccggtacaggtaacccgttctttaccaccgactcagcagcttgcctgcgtggtatcgaaattgaagccgatgtggtgctgaaagcaaccaaagttgacggcgtgtttaccgctgatccggcgaaagatccaaccgcaaccatgtacgagcaactgacttacagcgaagtgctggaaaaagagctgaaagtcatggacctggcggccttcacgctggctcgtgaccataaattaccgattcgtgttttcaatatgaacaaaccgggtgcgctgcgccgtgtggtaatgggtgaaaaagaagggactttaatcacggaataa

SEQ ID NO: 396 - DNA, 1638 bp, Escherichia coli
atgacaacgaactatatttttgtgaccggcggggtcgtatcctctctgggtaaaggcattgccgcagcctccctcgcagccattcttgaagcccgtggcctcaatgtgaccatcatgaaactggatccgtacatcaacgtcgatccaggtactatgagcccaatccaacacggggaagtgttcgttactgaagacggcgctgaaaccgacctggacctggggcactacgagcgtttcattcgtaccaaaatgagccgccgcaacaacttcaccacgggtcgtatctactctgacgttctgcgtaaagaacgccgcggtgactacctcggcgcaaccgtgcaggttattccgcacatcactaacgcaatcaaagagcgcgtgctggaaggtggcgaaggtcatgacgtagtactggtagaaatcggcggtacagtaggtgatatcgaatccttgccgttcctcgaagcgattcgccagatggctgttgaaattggccgtgagcacactctgtttatgcacctgacgctggtgccgtacatggcagcgtctggtgaagtcaaaaccaaaccgactcagcactctgtaaaagagctgctctccatcggtatccagcctgacatcctgatttgtcgttcagatcgcgctgttccggcgaacgaacgtgcgaagattgcattgttctgtaatgttccggaaaaagcggttatttctctgaaagacgtcgattccatctataaaattccgggcctgttgaaatctcaggggctggacgattatatttgtaaacgattcagcttaaactgcccggaagcgaatctgtccgaatgggaacaggttatcttcgaagaagcgaacccggtaagtgaagtcaccatcggtatggtcggcaagtacattgaactgccggatgcttataaatcagtgatcgaagcactgaaacacggtgggctgaagaatcgtgtcagcgtcaacatcaaactgatcgattcacaagatgttgaaacgcgcggcgttgaaatccttaaaggtctggacgcaatcctcgtacctggcggtttcggctatcgtggcgtagaaggcatgattacgaccgcgcgttttgcgcgtgagaacaatattccttatctgggcatttgcctgggtatgcaggtggcgttaattgattacgctcgccatgttgccaacatggagaacgccaactctacggaatttgtgccagactgtaagtacccggttgtggcgctgattaccgagtggcgcgatgaaaacggcaacgttgaagttcgtagcgagaagagcgatctcggcggtaccatgcgtctcggcgcacagcagtgccagttggttgacgatagcctggttcgccagctgtacaatgcgccgacaattgttgagcgtcatcgtcaccgttacgaagtcaacaacatgctgttgaaacagattgaagatgcaggtctgcgcgttgcgggccgttccggggatgatcagttggtcgagatcatcgaagttccgaatcacccgtggttcgtggcttgccagttccatccggagtttacttctactccacgtgatggtcacccgctgtttgcaggctttgtgaaagccgccagcgagttccagaaacgtcaggcgaagtaa

SEQ ID NO: 397 - DNA, 1380 bp, Escherichia coli; identical to SEQ ID NO: 351

SEQ ID NO: 398 - protein, 321 aa, Escherichia coli
MTKYALVGDVGGTNARLALCDIASGEISQAKTYSGLDYPSLEAVIRVYLEEHKVEVKDGCIAIACPITGDWVAMTNHTWAFSIAEMKKNLGFSHLEIINDFTAVSMAIPMLKKEHLIQFGGAEPVEGKPIAVYGAGTGLGVAHLVHVDKRWVSLPGEGGHVDFAPNSEEEAIILEILRAEIGHVSAERVLSGPGLVNLYRAIVKADNRLPENLKPKDITERALADSCTDCRRALSLFCVIMGRFGGNLALNLGTFGGVFIAGGIVPRFLEFFKASGFRAAFEDKGRFKEYVHDIPVYLIVHDNPGLLGSGAHLRQTLGHIL

SEQ ID NO: 399 - protein, 549 aa, Escherichia coli
MKNINPTQTAAWQALQKHFDEMKDVTIADLFAKDGDRFSKFSATFDDQMLVDYSKNRITEETLAKLQDLAKECDLAGAIKSMFSGEKINRTENRAVLHVALRNRSNTPILVDGKDVMPEVNAVLEKMKTFSEAIISGEWKGYTGKAITDVVNIGIGGSDLGPYMVTEALRPYKNHLNMHFVSNVDGTHIAEVLKKVNPETTLFLVASKTFTTQETMTNAHSARDWFLKAAGDEKHVAKHFAALSTNAKAVGEFGIDTANMFEFWDWVGGRYSLWSAIGLSIVLSIGFDNFVELLSGAHAMDKHFSTTPAEKNLPVLLALIGIWYNNFFGAETEAILPYDQYMHRFAAYFQQGNMESNGKYVDRNGNVVDYQTGPIIWGEPGTNGQHAFYQLIHQGTKMVPCDFIAPAITHNPLSDHHQKLLSNFFAQTEALAFGKSREVVEQEYRDQGKDPATLDYVVPFKVFEGNRPTNSILLREITPFSLGALIALYEHKIFTQGVILNIFTFDQWGVELGKQLANRILPELKDDKEISSHDSSTNGLINRYKAWRG

SEQ ID NO: 400 - protein, 491 aa, Escherichia coli
MAVTQTAQACDLVIFGAKGDLARRKLLPSLYQLEKAGQLNPDTRIIGVGRADWDKAAYTKVVREALETFMKETIDEGLWDTLSARLDFCNLDVNDTAAFSRLGAMLDQKNRITINYFAMPPSTFGAICKGLGEAKLNAKPARVVMEKPLGTSLATSQEINDQVGEYFEECQVYRIDHYLGKETVLNLLALRFANSLFVNNWDNRTIDHVEITVAEEVGIEGRWGYFDKAGQMRDMIQNHLLQILCMIAMSPPSDLSADSIRDEKVKVLKSLRRIDRSNVREKTVRGQYTAGFAQGKKVPGYLEEEGANKSSNTETFVAIRVDIDNWRWAGVPFYLRTGKRLPTKCSEVVVYFKTPELNLFKESWQDLPQNKLTIRLQPDEGVDIQVLNKVPGLDHKHNLQITKLDLSYSETFNQTHLADAYERLLLETMRGIQALFVRRDEVEEAWKWVDSITEAWAMDNDAPKPYQAGTWGPVASVAMITRDGRSWNEFE

SEQ ID NO: 401 - protein, 468 aa, Escherichia coli
MSKQQIGVVGMAVMGRNLALNIESRGYTVSIFNRSREKTEEVIAENPGKKLVPYYTVKEFVESLETPRRILLMVKAGAGTDAAIDSLKPYLDKGDIIIDGGNTFFQDTIRRNRELSAEGFNFIGTGVSGGEEGALKGPSIMPGGQKEAYELVAPILTKIAAVAEDGEPCVTYIGADGAGHYVKMVHNGIEYGDMQLIAEAYSLLKGGLNLTNEELAQTFTEWNNGELSSYLIDITKDIFTKKDEDGNYLVDVILDEAANKGTGKWTSQSALDLGEPLSLITESVFARYISSLKDQRVAASKVLSGPQAQPAGDKAEFIEKVRRALYLGKIVSYAQGFSQLRAASEEYNWDLNYGEIAKIFRAGCIIRAQFLQKITDAYAENPQIANLLLAPYFKQIADDYQQALRDVVAYAVQNGIPVPTFSAAVAYYDSYRAAVLPANLIQAQRDYFGAHTYKRIDKEGVFHTEWLD

SEQ ID NO: 402 - protein, 225 aa, Escherichia coli
MKQYLIAPSILSADFARLGEDTAKALAAGADVVHFDVMDNHYVPNLTIGPMVLKSLRNYGITAPIDVHLMVKPVDRIVPDFAAAGASIITFHPEASEHVDRTLQLIKENGCKAGLVFNPATPLSYLDYVMDKLDVILLMSVNPGFGGQSFIPQTLDKLREVRRRIDESGFDIRLEVDGGVKVNNIGEIAAAGADMFVAGSAIFDQPDYKKVIDEMRSELAKVSHE

SEQ ID NO: 403 - protein, 219 aa, Escherichia coli
MTQDELKKAVGWAALQYVQPGTIVGVGTGSTAAHFIDALGTMKGQIEGAVSSSDASTEKLKSLGIHVFDLNEVDSLGIYVDGADEINGHMQMIKGGGAALTREKIIASVAEKFICIADASKQVDILGKFPLPVEVIPMARSAVARQLVKLGGRPEYRQGVVTDNGNVILDVHGMEILDPIAMENAINAIPGVVTVGLFANRGADVALIGTPDGVKTIVK

SEQ ID NO: 404 - protein, 149 aa, Escherichia coli
MKKIAFGCDHVGFILKHEIVAHLVERGVEVIDKGTWSSERTDYPHYASQVALAVAGGEVDGGILICGTGVGISIAANKFAGIRAVVCSEPYSAQLSRQHNDTNVLAFGSRVVGLELAKMIVDAWLGAQYEGGRHQQRVEAITAIEQRRN

SEQ ID NO: 405 - protein, 663 aa, Escherichia coli
MSSRKELANAIRALSMDAVQKAKSGHPGAPMGMADIAEVLWRDFLKHNPQNPSWADRDRFVLSNGHGSMLIYSLLHLTGYDLPMEELKNFRQLHSKTPGHPEVGYTAGVETTTGPLGQGIANAVGMAIAEKTLAAQFNRPGHDIVDHYTYAFMGDGCMMEGISHEVCSLAGTLKLGKLIAFYDDNGISIDGHVEGWFTDDTAMRFEAYGWHVIRDIDGHDAASIKRAVEEARAVTDKPSLLMCKTIIGFGSPNKAGTHDSHGAPLGDAEIALTREQLGWKYAPFEIPSEIYAQWDAKEAGQAKESAWNEKFAAYAKAYPQEAAEFTRRMKGEMPSDFDAKAKEFIAKLQANPAKIASRKASQNAIEAFGPLLPEFLGGSADLAPSNLTLWSGSKAINEDAAGNYIHYGVREFGMTAIANGISLHGGFLPYTSTFLMFVEYARNAVRMAALMKQRQVMVYTHDSIGLGEDGPTHQPVEQVASLRVTPNMSTWRPCDQVESAVAWKYGVERQDGPTALILSRQNLAQQERTEEQLANIARGGYVLKDCAGQPELIFIATGSEVELAVAAYEKLTAEGVKARVVSMPSTDAFDKQDAAYRESVLPKAVTARVAVEAGIADYWYKYVGLNGAIVGMTTFGESAPAELLFEEFGFTVDNVVAKAKELL

SEQ ID NO: 406 - protein, 667 aa, Escherichia coli
MSRKDLANAIRALSMDAVQKANSGHPGAPMGMADIAEVLWNDFLKHNPTDPTWYDRDRFILSNGHASMLLYSLLHLTGYDLPLEELKNFRQLHSKTPGHPEIGYTPGVETTTGPLGQGLANAVGLAIAERTLAAQFNQPDHEIVDHFTYVFMGDGCLMEGISHEVCSLAGTLGLGKLIGFYDHNGISIDGETEGWFTDDTAKRFEAYHWHVIHEIDGHDPQAVKEAILEAQSVKDKPSLIICRTVIGFGSPNKAGKEEAHGAPLGEEEVALARQKLGWHHPPFEIPKEIYHAWDAREKGEKAQQSWNEKFAAYKKAHPQLAEEFTRRMSGGLPKDWEKTTQKYINELQANPAKIATRKASQNTLNAYGPMLPELLGGSADLAPSNLTIWKGSVSLKEDPAGNYIHYGVREFGMTAIANGIAHHGGFVPYTATFLMFVEYARNAARMAALMKARQIMVYTHDSIGLGEDGPTHQAVEQLASLRLTPNFSTWRPCDQVEAAVGWKLAVERHNGPTALILSRQNLAQVERTPDQVKEIARGGYVLKDSGGKPDIILIATGSEMEITLQAAEKLAGEGRNVRVVSLPSTDIFDAQDEEYRESVLPSNVAARVAVEAGIADYWYKYVGLKGAIVGMTGYGESAPADKLFPFFGFTAENIVAKAHKVLGVKGA

SEQ ID NO: 407 - protein, 316 aa, Escherichia coli
MNELDGIKQFTTVVADSGDIESIRHYHPQDATTNPSLLLKAAGLSQYEHLIDDAIAWGKKNGKTQEQQVVAACDKLAVNFGAEILKIVPGRVSTEVDARLSFDKEKSIEKARHLVDLYQQQGVEKSRILIKLASTWEGIRAAEELEKEGINCNLTLLFSFAQARACAEAGVFLISPFVGRIYDWYQARKPMDPYVVEEDPGVKSVRNIYDYYKQHHYETIVMGASFRRTEQILALTGCDRLTIAPNLLKELQEKVSPVVRKLIPPSQTFPRPAPMSEAEFRWEHNQDAMAVEKLSEGIRLFAVDQRKLEDLLAAKL

SEQ ID NO: 408 - protein, 317 aa, Escherichia coli
MTDKLTSLRQYTTVVADTGDIAAMKLYQPQDATTNPSLILNAAQIPEYRKLIDDAVAWAKQQSNDRAQQIVDATDKLAVNIGLEILKLVPGRISTEVDARLSYDTEASIAKAKRLIKLYNDAGISNDRILIKLASTWQGIRAAEQLEKEGINCNLTLLFSFAQARACAEAGVFLISPFVGRILDWYKANTDKKEYAPAEDPGVVSVSEIYQYYKEHGYETVVMGASFRNIGEILELAGCDRLTIAPALLKELAESEGAIERKLSYTGEVKARPARITESEFLWQHNQDPMAVDKLAEGIRKFAIDQEKLEKMIGDLL

SEQ ID NO: 409 - protein, 320 aa, Escherichia coli
MIKKIGVLTSGGDAPGMNAAIRGVVRSALTEGLEVMGIYDGYLGLYEDRMVQLDRYSVSDMINRGGTFLGSARFPEFRDENIRAVAIENLKKRGIDALVVIGGDGSYMGAMRLTEMGFPCIGLPGTIDNDIKGTDYTIGFFTALSTVVEAIDRLRDTSSSHQRISVVEVMGRYCGDLTLAAAIAGGCEFVVVPEVEFSREDLVNEIKAGIAKGKKHAIVAITEHMCDVDELAHFIEKETGRETRATVLGHIQRGGSPVPYDRILASRMGAYAIDLLLAGYGGRCVGIQNEQLVHHDIIDAIENMKRPFKGDWLDCAKKLY

SEQ ID NO: 410 - protein, 309 aa, Escherichia coli
MVRIYTLTLAPSLDSATITPQIYPEGKLRCTAPVFEPGGGGINVARAIAHLGGSATAIFPAGGATGEHLVSLLADENVPVATVEAKDWTRQNLHVHVEASGEQYRFVMPGAALNEDEFRQLEEQVLEIESGAILVISGSLPPGVKLEKLTQLISAAQKQGIRCIVDSSGEALSAALAIGNIELVKPNQKELSALVNRELTQPDDVRKAAQEIVNSGKAKRVVVSLGPQGALGVDSENCIQVVPPPVKSQSTVGAGDSMVGAMTLKLAENASLEEMVRFGVAAGSAATLNQGTRLCSHDDTQKIYAYLSR

SEQ ID NO: 411 - protein, 359 aa, Escherichia coli
MSKIFDFVKPGVITGDDVQKVFQVAKENNFALPAVNCVGTDSINAVLETAAKVKAPVIVQFSNGGASFIAGKGVKSDVPQGAAILGAISGAHHVHQMAEHYGVPVILHTDHCAKKLLPWIDGLLDAGEKHFAATGKPLFSSHMIDLSEESLQENIEICSKYLERMSKIGMTLEIELGCTGGEEDGVDNSHMDASALYTQPEDVDYAYTELSKISPRFTIAASFGNVHGVYKPGNVVLTPTILRDSQEYVSKKHNLPHNSLNFVFHGGSGSTAQEIKDSVSYGVVKMNIDTDTQWATWEGVLNYYKANEAYLQGQLGNPKGEDQPNKKYYDPRVWLRAGQTSMIARLEKAFQELNAIDVL

SEQ ID NO: 412 - protein, 350 aa, Escherichia coli [sequence omitted]

SEQ ID NO: 413 - protein, 255 aa, Escherichia coli
MRHPLVMGNWKLNGSRHMVHELVSNLRKELAGVAGCAVAIAPPEMYIDMAKREAEGSHIMLGAQNVDLNLSGAFTGETSAAMLKDIGAQYIIIGHSERRTYHKESDELIAKKFAVLKEQGLTPVLCIGETEAENEAGKTEEVCARQIDAVLKTQGAAAFEGAVIAYEPVWAIGTGKSATPAQAQAVHKFIRDHIAKVDANIAEQVIIQYGGSVNASNAAELFAQPDIDGALVGGASLKADAFAVIVKAAEAAKQA

SEQ ID NO: 414 - protein, 331 aa, Escherichia coli
MTIKVGINGFGRIGRIVFRAAQKRSDIEIVAINDLLDADYMAYMLKYDSTHGRFDGTVEVKDGHLIVNGKKIRVTAERDPANLKWDEVGVDVVAEATGLFLTDETARKHITAGAKKVVMTGPSKDNTPMFVKGANFDKYAGQDIVSNASCTTNCLAPLAKVINDNFGIIEGLMTTVHATTATQKTVDGPSHKDWRGGRGASQNIIPSSTGAAKAVGKVLPELNGKLTGMAFRVPTPNVSVVDLTVRLEKAATYEQIKAAVKAAAEGEMKGVLGYTEDDVVSTDFNGEVCTSVFDAKAGIALNDNFVKLVSWYDNETGYSNKVLDLIAHISK

SEQ ID NO: 415 - protein, 387 aa, Escherichia coli
MSVIKMTDLDLAGKRVFIRADLNVPVKDGKVTSDARIRASLPTIELALKQGAKVMVTSHLGRPTEGEYNEEFSLLPVVNYLKDKLSNPVRLVKDYLDGVDVAEGELVVLENVRFNKGEKKDDETLSKKYAALCDVFVMDAFGTAHRAQASTHGIGKFADVACAGPLLAAELDALGKALKEPARPMVAIVGGSKVSTKLTVLDSLSKIADQLIVGGGIANTFIAAQGHDVGKSLYEADLVDEAKRLLTTCNIPVPSDVRVATEFSETAPATLKSVNDVKADEQILDIGDASAQELAEILKNAKTILWNGPVGVFEFPNFRKGTEIVANAIADSEAFSIAGGGDTLAAIDLFGIADKISYISTGGGAFLEFVEGKVLPAVAMLEERAKK

SEQ ID NO: 416 - protein, 215 aa, Escherichia coli
MLQVYLVRHGETQWNAERRIQGQSDSPLTAKGEQQAMQVATRAKELGITHIISSDLGRTRRTAEIIAQACGCDIIFDSRLRELNMGVLEKRHIDSLTEEEENWRRQLVNGTVDGRIPEGESMQELSDRVNAALESCRDLPQGSRPLLVSHGIALGCLVSTILGLPAWAERRLRLRNCSISRVDYQESLWLASGWVVETAGDISHLDAPALDELQR

SEQ ID NO: 417 - protein, 250 aa, Escherichia coli
MAVTKLVLVRHGESQWNKENRFTGWYDVDLSEKGVSEAKAAGKLLKEEGYSFDFAYTSVLKRAIHTLWNVLDELDQAWLPVEKSWKLNERHYGALQGLNKAETAEKYGDEQVKQWRRGFAVTPPELTKDDERYPGHDPRYAKLSEKELPLTESLALTIDRVIPYWNETILPRMKSGERVIIAAHGNSLRALVKYLDNMSEEEILELNIPTGVPLVYEFDENFKPLKRYYLGNADEIAAKAAAVANQGKAK

SEQ ID NO: 418 - protein, 514 aa, Escherichia coli
MLVSKKPMVLVILDGYGYREEQQDNAIFSAKTPVMDALWANRPHTLIDASGLEVGLPDRQMGNSEVGHVNLGAGRIVYQDLTRLDVEIKDRAFFANPVLTGAVDKAKNAGKAVHIMGLLSAGGVHSHEDHIMAMVELAAERGAEKIYLHAFLDGRDTPPRSAESSLKKFEEKFAALGKGRVASIIGRYYAMDRDNRWDRVEKAYDLLTLAQGEFQADTAVAGLQAAYARDENDEFVKATVIRAEGQPDAAMEDGDALIFMNFRADRAREITRAFVNADFDGFARKKVVNVDFVMLTEYAADIKTAVAYPPASLVNTFGEWMAKNDKTQLRISETEKYAHVTFFFNGGVEESFKGEDRILINSPKVATYDLQPEMSSAELTEKLVAAIKSGKYDTIICNYPNGDMVGHTGVMEAAVKAVEALDHCVEEVAKAVESVGGQLLITADHGNAEQMRDPATGQAHTAHTNLPVPLIYVGDKNVKAVEGGKLSDIAPTMLSLMGMEIPQEMTGKPLFIVE

SEQ ID NO: 419 - protein, 432 aa, Escherichia coli
MSKIVKIIGREIIDSRGNPTVEAEVHLEGGFVGMAAAPSGASTGSREALELRDGDKSRFLGKGVTKAVAAVNGPIAQALIGKDAKDQAGIDKIMIDLDGTENKSKFGANAILAVSLANAKAAAAAKGMPLYEHIAELNGTPGKYSMPVPMMNIINGGEHADNNVDIQEFMIQPVGAKTVKEAIRMGSEVFHHLAKVLKAKGMNTAVGDEGGYAPNLGSNAEALAVIAEAVKAAGYELGKDITLAMDCAASEFYKDGKYVLAGEGNKAFTSEEFTHFLEELTKQYPIVSIEDGLDESDWDGFAYQTKVLGDKIQLVGDDLFVTNTKILKEGIEKGIANSILIKFNQIGSLTETLAAIKMAKDAGYTAVISHRSGETEDATIADLAVGTAAGQIKTGSMSRSDRVAKYNQLIRIEEALGEKAPYNGRKEIKGQA

SEQ ID NO: 420 - protein, 480 aa, Escherichia coli
MSRRLRRTKIVTTLGPATDRDNNLEKVIAAGANVVRMNFSHGSPEDHKMRADKVREIAAKLGRHVAILGDLQGPKIRVSTFKEGKVFLNIGDKFLLDANLGKGEGDKEKVGIDYKGLPADVVPGDILLLDDGRVQLKVLEVQGMKVFTEVTVGGPLSNNKGINKLGGGLSAEALTEKDKADIKTAALIGVDYLAVSFPRCGEDLNYARRLARDAGCDAKIVAKVERAEAVCSQDAMDDIILASDVVMVARGDLGVEIGDPELVGIQKALIRRARQLNRAVITATQMMESMITNPMPTRAEVMDVANAVLDGTDAVMLSAETAAGQYPSETVAAMARVCLGAEKIPSINVSKHRLDVQFDNVEEAIAMSAMYAANHLKGVTAIITMTESGRTALMTSRISSGLPIFAMSRHERTLNLTALYRGVTPVHFDSANDGVAAASEAVNLLRDKGYLMSGDLVIVTQGDVMSTVGSTNTTRILTVE

SEQ ID NO: 421 - protein, 470 aa, Escherichia coli
MKKTKIVCTIGPKTESEEMLAKMLDAGMNVMRLNFSHGDYAEHGQRIQNLRNVMSKTGKTAAILLDTKGPEIRTMKLEGGNDVSLKAGQTFTFTTDKSVIGNSEMVAVTYEGFTTDLSVGNTVLVDDGLIGMEVTAIEGNKVICKVLNNGDLGENKGVNLPGVSIALPALAEKDKQDLIFGCEQGVDFVAASFIRKRSDVIEIREHLKAHGGENIHIISKIENQEGLNNFDEILEASDGIMVARGDLGVEIPVEEVIFAQKMMIEKCIRARKVVITATQMLDSMIKNPRPTRAEAGDVANAILDGTDAVMLSGESAKGKYPLEAVSIMATICERTDRVMNSRLEFNNDNRKLRITEAVCRGAVETAEKLDAPLIVVATQGGKSARAVRKYFPDATILALTTNEKTAHQLVLSKGVVPQLVKEITSTDDFYRLGKELALQSGLAHKGDVVVMVSGALVPSGTTNTASVHVL

SEQ ID NO: 422 - protein, 474 aa, Escherichia coli [sequence omitted]

SEQ ID NO: 423 - protein, 887 aa, Escherichia coli
MSERFPNDVDPIETRDWLQAIESVIREEGVERAQYLIDQLLAEARKGGVNVAAGTGISNYINTIPVEEQPEYPGNLELERRIRSAIRWNAIMTVLRASKKDLELGGHMASFQSSATIYDVCFNHFFRARNEQDGGDLVYFQGHISPGVYARAFLEGRLTQEQLDNFRQEVHGNGLSSYPHPKLMPEFWQFPTVSMGLGPIGAIYQAKFLKYLEHRGLKDTSKQTVYAFLGDGEMDEPESKGAITIATREKLDNLVFVINCNLQRLDGPVTGNGKIINELEGIFEGAGWNVIKVMWGSRWDELLRKDTSGKLIQLMNETVDGDYQTFKSKDGAYVREHFFGKYPETAALVADWTDEQIWALNRGGHDPKKIYAAFKKAQETKGKATVILAHTIKGYGMGDAAEGKNIAHQVKKMNMDGVRHIRDRFNVPVSDADIEKLPYITFPEGSEEHTYLHAQRQKLHGYLPSRQPNFTEKLELPSLQDFGALLEEQSKEISTTIAFVRALNVMLKNKSIKDRLVPIIADEARTFGMEGLFRQIGIYSPNGQQYTPQDREQVAYYKEDEKGQILQEGINELGAGCSWLAAATSYSTNNLPMIPFYIYYSMFGFQRIGDLCWAAGDQQARGFLIGGTSGRTTLNGEGLQHEDGHSHIQSLTIPNCISYDPAYAYEVAVIMHDGLERMYGEKQENVYYYITTLNENYHMPAMPEGAEEGIRKGIYKLETIEGSKGKVQLLGSGSILRHVREAAEILAKDYGVGSDVYSVTSFTELARDGQDCERWNMLHPLETPRVPYIAQVMNDAPAVASTDYMKLFAEQVRTYVPADDYRVLGTDGFGRSDSRENLRHHFEVDASYVVVAALGELAKRGEIDKKVVADAIAKFNIDADKVNPRLA

SEQ ID NO: 424 - protein, 630 aa, Escherichia coli
MAIEIKVPDIGADEVEITEILVKVGDKVEAEQSLITVEGDKASMEVPSPQAGIVKEIKVSVGDKTQTGALIMIFDSADGAADAAPAQAEEKKEAAPAAAPAAAAAKDVNVPDIGSDEVEVTEILVKVGDKVEAEQSLITVEGDKASMEVPAPFAGTVKEIKVNVGDKVSTGSLIMVFEVAGEAGAAAPAAKQEAAPAAAPAPAAGVKEVNVPDIGGDEVEVTEVMVKVGDKVAAEQSLITVEGDKASMEVPAPFAGVVKELKVNVGDKVKTGSLIMIFEVEGAAPAAAPAKQEAAAPAPAAKAEAPAAAPAAKAEGKSEFAENDAYVHATPLIRRLAREFGVNLAKVKGTGRKGRILREDVQAYVKEAIKRAEAAPAATGGGIPGMLPWPKVDFSKFGEIEEVELGRIQKISGANLSRNWVMIPHVTHFDKTDITELEAFRKQQNEEAAKRKLDVKITPVVFIMKAVAAALEQMPRFNSSLSEDGQRLTLKKYINIGVAVDTPNGLVVPVFKDVNKKGIIELSRELMTISKKARDGKLTAGEMQGGCFTISSIGGLGTTHFAPIVNAPEVAILGVSKSAMEPVWNGKEFVPRLMLPISLSFDHRVIDGADGARFITIINNTLSDIRRLVM

SEQ ID NO: 425 - protein, 427 aa, Escherichia coli
MADTKAKLTLNGDTAVELDVLKGTLGQDVIDIRTLGSKGVFTFDPGFTSTASCESKITFIDGDEGILLHRGFPIDQLATDSNYLEVCYILLNGEKPTQEQYDEFKTTVTRHTMIHEQITRLFHAFRRDSHPMAVMCGITGALAAFYHDSLDVNNPRHREIAAFRLLSKMPTMAAMCYKYSIGQPFVYPRNDLSYAGNFLNMMFSTPCEPYEVNPILERAMDRILILHADHEQNASTSTVRTAGSSGANPFACIAAGIASLWGPAHGGANEAALKMLEEISSVKHIPEFVRRAKDKNDSFRLMGFGHRVYKNYDPRATVMRETCHEVLKELGTKDDLLEVAMELENIALNDPYFIEKKLYPNVDFYSGIILKAMGIPSSMFTVIFAMARTVGWIAHWSEMHSDGMKIARPRQLYTGYEKRDFKSDIKR

SEQ ID NO: 426 - protein, 389 aa, Escherichia coli
MSDTTILQNSTHVIKPKKSVALSGVPAGNTALCTVGKSGNDLHYRGYDILDLAKHCEFEEVAHLLIHGKLPTRDELAAYKTKLKALRGLPANVRTVLEALPAASHPMDVMRTGVSALGCTLPEKEGHTVSGARDIADKLLASLSSILLYWYHYSHNGERIQPETDDDSIGGHFLHLLHGEKPSQSWEKAMHISLVLYAEHEFNASTFTSRVIAGTGSDMYSAIIGAIGALRGPKHGGANEVSLEIQQRYETPDEAEADIRKRVENKEVVIGFGHPVYTIADPRHQVIKRVAKQLSQEGGSLKMYNIADRLETVMWESKKMFPNLDWFSAVSYNMMGVPTEMFTPLFVIARVTGWAAHIIEQRQDNKIIRPSANYVGPEDRPFVALDKRQ

SEQ ID NO: 427 - protein, 891 aa, Escherichia coli
MSSTLREASKDTLQAKDKTYHYYSLPLAAKSLGDITRLPKSLKVLLENLLRWQDGNSVTEEDIHALAGWLKNAHADREIAYRPARVLMQDFTGVPAVVDLAAMREAVKRLGGDTAKVNPLSPVDLVIDHSVTVDRFGDDEAFEENVRLEMERNHERYVFLKWGKQAFSRFSVVPPGTGICHQVNLEYLGKAVWSELQDGEWIAYPDTLVGTDSHTTMINGLGVLGWGVGGIEAEAAMLGQPVSMLIPDVVGFKLTGKLREGITATDLVLTVTQMLRKHGVVGKFVEFYGDGLDSLPLADRATIANMSPEYGATCGFFPIDAVTLDYMRLSGRSEDQVELVEKYAKAQGMWRNPGDEPIFTSTLELDMNDVEASLAGPKRPQDRVALPDVPKAFAASNELEVNATHKDRQPVDYVMNGHQYQLPDGAVVIAAITSCTNTSNPSVLMAAGLLAKKAVTLGLKRQPWVKASLAPGSKVVSDYLAKAKLTPYLDELGFNLVGYGCTTCIGNSGPLPDPIETAIKKSDLTVGAVLSGNRNFEGRIHPLVKTNWLASPPLVVAYALAGNMNINLASEPIGHDRKGDPVYLKDIWPSAQEIARAVEQVSTEMFRKEYAEVFEGTAEWKGINVTRSDTYGWQEDSTYIRLSPFFDEMQATPAPVEDIHGARILAMLGDSVTTDHISPAGSIKPDSPAGRYLQGRGVERKDFNSYGSRRGNHEVMMRGTFANIRIRNEMVPGVEGGMTRHLPDSDVVSIYDAAMRYKQEQTPLAVIAGKEYGSGSSRDWAAKGPRLLGIRVVIAESFERIHRSNLIGMGILPLEFPQGVTRKTLGLTGEEKIDIGDLQNLQPGATVPVTLTRADGSQEVVPCRCRIDTATELTYYQNDGILHYVIRNMLK

SEQ ID NO: 428 - protein, 865 aa, Escherichia coli
MLEEYRKHVAERAAEGIAPKPLDANQMAALVELLKNPPAGEEEFLLDLLTNRVPPGVDEAAYVKAGFLAAIAKGEAKSPLLTPEKAIELLGTMQGGYNIHPLIDALDDAKLAPIAAKALSHTLLMFDNFYDVEEKAKAGNEYAKQVMQSWADAEWFLNRPALAEKLTVTVFKVTGETNTDDLSPAPDAWSRPDIPLHALAMLKNAREGIEPDQPGVVGPIKQIEALQQKGFPLAYVGDVVGTGSSRKSATNSVLWFMGDDIPHVPNKRGGGLCLGGKIAPIFFNTMEDAGALPIEVDVSNLNMGDVIDVYPYKGEVRNHETGELLATFELKTDVLIDEVRAGGRIPLIIGRGLTTKAREALGLPHSDVFRQAKDVAESDRGFSLAQKMVGRACGVKGIRPGAYCEPKMTSVGSQDTTGPMTRDELKDLACLGFSADLVMQSFCHTAAYPKPVDVNTHHTLPDFIMNRGGVSLRPGDGVIHSWLNRMLLPDTVGTGGDSHTRFPIGISFPAGSGLVAFAAATGVMPLDMPESVLVRFKGKMQPGITLRDLVHAIPLYAIKQGLLTVEKKGKKNIFSGRILEIEGLPDLKVEQAFELTDASAERSAAGCTIKLNKEPIIEYLNSNIVLLKWMIAEGYGDRRTLERRIQGMEKWLANPELLEADADAEYAAVIDIDLADIKEPILCAPNDPDDARPLSAVQGEKIDEVFIGSCMTNIGHFRAAGKLLDAHKGQLPTRLWVAPPTRMDAAQLTEEGYYSVFGKSGARIEIPGCSLCMGNQARVADGATVVSTSTRNFPNRLGTGANVFLASAELAAVAALIGKLPTPEEYQTYVAQVDKTAVDTYRYLNFNQLSQYTEKADGVIFQTAV

SEQ ID NO: 429 - protein, 416 aa, Escherichia coli
MESKVVVPAQGKKITLQNGKLNVPENPIIPYIEGDGIGVDVTPAMLKVVDAAVEKAYKGERKISWMEIYTGEKSTQVYGQDVWLPAETLDLIREYRVAIKGPLTTPVGGGIRSLNVALRQELDLYICLRPVRYYQGTPSPVKHPELTDMVIFRENSEDIYAGIEWKADSADAEKVIKFLREEMGVKKIRFPEHCGIGIKPCSEEGTKRLVRAAIEYAIANDRDSVTLVHKGNIMKFTEGAFKDWGYQLAREEFGGELIDGGPWLKVKNPNTGKEIVIKDVIADAFLQQILLRPAEYDVIACMNLNGDYISDALAAQVGGIGIAPGANIGDECALFEATHGTAPKYAGQDKVNPGSIILSAEMMLRHMGWTEAADLIVKGMEGAINAKTVTYDFERLMDGAKLLKCSEFGDAIIENM

SEQ ID NO: 430 - protein, 305 aa, Escherichia coli
MELIFLGTSAGVPTRTRNVTAILLNLQHPTQSGLWLFDCGEGTQHQLLHTAFNPGKLDKIFISHLHGDHLFGLPGLLCSRSMSGIIQPLTIYGPQGIREFVETALRISGSWTDYPLEIVEIGAGEILDDGLRKVTAYPLEHPLECYGYRIEEHDKPGALNAQALKAAGVPPGPLFQELKAGKTITLEDGRQINGADYLAAPVPGKALAIFGDTGPCDAALDLAKGVDVMVHEATLDITMEAKANSRGHSSTRQAATLAREAGVGKLIITHVSSRYDDKGCQHLLRECRSIFPATELANDFTVFNV

SEQ ID NO: 431 - protein, 933 aa, Escherichia coli
MQNSALKAWLDSSYLSGANQSWIEQLYEDFLTDPDSVDANWRSTFQQLPGTGVKPDQFHSQTREYFRRLAKDASRYSSTISDPDTNVKQVKVLQLINAYRFRGHQHANLDPLGLWQQDKVADLDPSFHDLTEADFQETFNVGSFASGKETMKLGELLEALKQTYCGPIGAEYMHITSTEEKRWIQQRIESGRATFNSEEKKRFLSELTAAEGLERYLGAKFPGAKRFSLEGGDALIPMLKEMIRHAGNSGTREVVLGMAHRGRLNVLVNVLGKKPQDLFDEFAGKHKEHLGTGDVKYHMGFSSDFQTDGGLVHLALAFNPSHLEIVSPVVIGSVRARLDRLDEPSSNKVLPITIHGDAAVTGQGVVQETLNMSKARGYEVGGTVRIVINNQVGFTTSNPLDARSTPYCTDIGKMVQAPIFHVNADDPEAVAFVTRLALDFRNTFKRDVFIDLVCYRRHGHNEADEPSATQPLMYQKIKKHPTPRKIYADKLEQEKVATLEDATEMVNLYRDALDAGDCVVAEWRPMNMHSFTWSPYLNHEWDEEYPNKVEMKRLQELAKRISTVPEAVEMQSRVAKIYGDRQAMAAGEKLFDWGGAENLAYATLVDEGIPVRLSGEDSGRGTFFHRHAVIHNQSNGSTYTPLQHIHNGQGAFRVWDSVLSEEAVLAFEYGYATAEPRTLTIWEAQFGDFANGAQVVIDQFISSGEQKWGRMCGLVMLLPHGYEGQGPEHSSARLERYLQLCAEQNMQVCVPSTPAQVYHMLRRQALRGMRRPLVVMSPKSLLRHPLAVSSLEELANGTFLPAIGEIDELDPKGVKRVVMCSGKVYYDLLEQRRKNNQHDVAIVRIEQLYPFPHKAMQEVLQQFAHVKDFVWCQEEPLNQGAWYCSQHHFREVIPFGASLRYAGRPASASPAVGYMSVHQKQQQDLVNDALNVE

SEQ ID NO: 432 - protein, 405 aa, Escherichia coli
MSSVDILVPDLPESVADATVATWHKKPGDAVVRDEVLVEIETDKVVLEVPASADGILDAVLEDEGTTVTSRQILGRLREGNSAGKETSAKSEEKASTPAQRQQASLEEQNNDALSPAIRRLLAEHNLDASAIKGTGVGGRLTREDVEKHLAKAPAKESAPAAAAPAAQPALAARSEKRVPMTRLRKRVAERLLEAKNSTAMLTTFNEVNMKPIMDLRKQYGEAFEKRHGIRLGFMSFYVKAVVEALKRYPEVNASIDGDDVVYHNYFDVSMAVSTPRGLVTPVLRDVDTLGMADIEKKIKELAVKGRDGKLTVEDLTGGNFTITNGGVFGSLMSTPIINPPQSAILGMHAIKDRPMAVNGQVEILPMMYLALSYDHRLIDGRESVGFLVTIKELLEDPTRLLLDV

SEQ ID NO: 433 - protein, 388 aa, Escherichia coli
MNLHEYQAKQLFARYGLPAPVGYACTTPREAEEAASKIGAGPWVVKCQVHAGGRGKAGGVKVVNSKEDIRAFAENWLGKRLVTYQTDANGQPVNQILVEAATDIAKELYLGAVVDRSSRRVVFMASTEGGVEIEKVAEETPHLIHKVALDPLTGPMPYQGRELAFKLGLEGKLVQQFTKIFMGLATIFLERDLALIEINPLVITKQGDLICLDGKLGADGNALFRQPDLREMRDQSQEDPREAQAAQWELNYVALDGNIGCMVNGAGLAMGTMDIVKLHGGEPANFLDVGGGATKERVTEAFKIILSDDKVKAVLVNIFGGIVRCDLIADGIIGAVAEVGVNVPVVVRLEGNNAELGAKKLADSGLNIIAAKGLTDAAQQVVAAVEGK

SEQ ID NO: 434 - protein, 289 aa, Escherichia coli
MSILIDKNTKVICQGFTGSQGTFHSEQAIAYGTKMVGGVTPGKGGTTHLGLPVFNTVREAVAATGATASVIYVPAPFCKDSILEAIDAGIKLIITITEGIPTLDMLTVKVKLDEAGVRMIGPNCPGVITPGECKIGIQPGHIHKPGKVGIVSRSGTLTYEAVKQTTDYGFGQSTCVGIGGDPIPGSNFIDILEMFEKDPQTEAIVMIGEIGGSAEEEAAAYIKEHVTKPVVGYIAGVTAPKGKRMGHAGAIIAGGKGTADEKFAALEAAGVKTVRSLADIGEALKTVLK

SEQ ID NO: 435 - protein, 434 aa, Escherichia coli
MKTRTQQIEELQKEWTQPRWEGITRPYSAEDVVKLRGSVNPECTLAQLGAAKMWRLLHGESKKGYINSLGALTGGQALQQAKAGIEAVYLSGWQVAADANLAASMYPDQSLYPANSVPAVVERINNTFRRADQIQWSAGIEPGDPRYVDYFLPIVADAEAGFGGVLNAFELMKAMIEAGAAAVHFEDQLASVKKCGHMGGKVLVPTQEAIQKLVAARLAADVTGVPTLLVARTDADAADLITSDCDPYDSEFITGERTSEGFFRTHAGIEQAISRGLAYAPYADLVWCETSTPDLELARRFAQAIHAKYPGKLLAYNCSPSFNWQKNLDDKTIASFQQQLSDMGYKFQFITLAGIHSMWFNMFDLANAYAQGEGMKHYVEKVQQPEFAAAKDGYTFVSHQQEVGTGYFDKVTTIIQGGTSSVTALTGSTEESQF

SEQ ID NO: 436 - protein, 533 aa, Escherichia coli
MTEQATTTDELAFTRPYGEQEKQILTAEAVEFLTELVTHFTPQRNKLLAARIQQQQDIDNGTLPDFISETASIRDADWKIRGIPADLEDRRVEITGPVERKMVINALNANVKVFMADFEDSLAPDWNKVIDGQINLRDAVNGTISYTNEAGKIYQLKPNPAVLICRVRGLHLPEKHVTWRGEAIPGSLFDFALYFFHNYQALLAKGSGPYFYLPKTQSWQEAAWWSEVFSYAEDRFNLPRGTIKATLLIETLPAVFQMDEILHALRDHIVGLNCGRWDYIFSYIKTLKNYPDRVLPDRQAVTMDKPFLNAYSRLLIKTCHKRGAFAMGGMAAFIPSKDEEHNNQVLNKVKADKSLEANNGHDGTWIAHPGLADTAMAVFNDILGSRKNQLEVMREQDAPITADQLLAPCDGERTEEGMRANIRVAVQYIEAWISGNGCVPIYGLMEDAATAEISRTSIWQWIHHQKTLSNGKPVTKALFRQMLGEEMKVIASELGEERFSQGRFDDAARLMEQITTSDELIDFLTLPGYRLLA

SEQ ID NO: 437 - protein, 588 aa, Escherichia coli
MKLPVREFDAVVIGAGGAGMRAALQISQSGQTCALLSKVFPTRSHTVSAQGGITVALGNTHEDNWEWHMYDTVKGSDYIGDQDAIEYMCKTGPEAILELEHMGLPFSRLDDGRIYQRPFGGQSKNFGGEQAARTAAAADRTGHALLHTLYQQNLKNHTTIFSEWYALDLVKNQDGAVVGCTALCIETGEVVYFKARATVLATGGAGRIYQSTTNAHINTGDGVGMAIRAGVPVQDMEMWQFHPTGIAGAGVLVTEGCRGEGGYLLNKHGERFMERYAPNAKDLAGRDVVARSIMIEIREGRGCDGPWGPHAKLKLDHLGKEVLESRLPGILELSRTFAHVDPVKEPIPVIPTCHYMMGGIPTKVTGQALTVNEKGEDVVVPGLFAVGEIACVSVHGANRLGGNSLLDLVVFGRAAGLHLQESIAEQGALRDASESDVEASLDRLNRWNNNRNGEDPVAIRKALQECMQHNFSVFREGDAMAKGLEQLKVIRERLKNARLDDTSSEFNTQRVECLELDNLMETAYATAVSANFRTESRGAHSRFDFPDRDDENWLCHSLYLPESESMTRRSVNMEPKLRPAFPPKIRTY

SEQ ID NO: 438 - protein, 238 aa, Escherichia coli
MRLEFSIYRYNPDVDDAPRMQDYTLEADEGRDMMLLDALIQLKEKDPSLSFRRSCREGVCGSDGLNMNGKNGLACITPISALNQPGKKIVIRPLPGLPVIRDLVVDMGQFYAQYEKIKPYLLNNGQNPPAREHLQMPEQREKLDGLYECILCACCSTSCPSFWWNPDKFIGPAGLLAAYRFLIDSRDTETDSRLDGLSDAFSVFRCHSIMNCVSVCPKGLNPTRAIGHIKSMLLQRNA

SEQ ID NO: 439 - protein, 129 aa, Escherichia coli [sequence omitted]

SEQ ID NO: 440 - protein, 115 aa, Escherichia coli
MVSNASALGRNGVHDFILVRATAIVLTLYIIYMVGFFATSGELTYEVWIGFFASAFTKVFTLLALFSILIHAWIGMWQVLTDYVKPLALRLMLQLVIVVALVVYVIYGFVVVWGV

SEQ ID NO: 441 - protein, 482 aa, Escherichia coli
MKLNDSNLFRQQALINGEWLDANNGEAIDVTNPANGDKLGSVPKMGADETRAAIDAANRALPAWRALTAKERATILRNWFNLMMEHQDDLARLMTLEQGKPLAEAKGEISYAASFIEWFAEEGKRIYGDTIPGHQADKRLIVIKQPIGVTAAITPWNFPAAMITRKAGPALAAGCTMVLKPASQTPFSALALAELAIRAGVPAGVFNVVTGSAGAVGNELTSNPLVRKLSFTGSTEIGRQLMEQCAKDIKKVSLELGGNAPFIVFDDADLDKAVEGALASKFRNAGQTCVCANRLYVQDGVYDRFAEKLQQAVSKLHIGDGLDNGVTIGPLIDEKAVAKVEEHIADALEKGARVVCGGKAHERGGNFFQPTILVDVPANAKVSKEETFGPLAPLFRFKDEADVIAQANDTEFGLAAYFYARDLSRVFRVGEALEYGIVGINTGIISNEVAPFGGIKASGLGREGSKYGIEDYLEIKYMCIGL

SEQ ID NO: 442 - protein, 462 aa, Escherichia coli
MTITPATHAISINPATGEQLSVLPWAGADDIENALQLAAAGFRDWRETNIDYRAEKLRDIGKALRARSEEMAQMITREMGKPINQARAEVAKSANLCDWYAEHGPAMLKAEPTLVENQQAVIEYRPLGTILAIMPWNFPLWQVMRGAVPIILAGNGYLLKHAPNVMGCAQLIAQVFKDAGIPQGVYGWLNADNDGVSQMIKDSRIAAVTVTGSVRAGAAIGAQAGAALKKCVLELGGSDPFIVLNDADLELAVKAAVAGRYQNTGQVCAAAKRFIIEEGIASAFTERFVAAAAALKMGDPRDEENALGPMARFDLRDELHHQVEKTLAQGARLLLGGEKMAGAGNYYPPTVLANVTPEMTAFREEMFGPVAAITIAKDAEHALELANDSEFGLSATIFTTDETQARQMAARLECGGVFINGYCASDARVAFGGVKKSGFGRELSHFGLHEFCNIQTVWKDRI

SEQ ID NO: 443 - protein, 479 aa, Escherichia coli
MSVPVQHPMYIDGQFVTWRGDAWIDVVNPATEAVISRIPDGQAEDARKAIDAAERAQPEWEALPAIERASWLRKISAGIRERASEISALIVEEGGKIQQLAEVEVAFTADYIDYMAEWARRYEGEIIQSDRPGENILLFKRALGVTTGILPWNFPFFLIARKMAPALLTGNTIVIKPSEFTPNNAIAFAKIVDEIGLPRGVFNLVLGRGETVGQELAGNPKVAMVSMTGSVSAGEKIMATAAKNITKVCLELGGKAPAIVMDDADLELAVKAIVDSRVINSGQVCNCAERVYVQKGIYDQFVNRLGEAMQAVQFGNPAERNDIAMGPLINAAALERVEQKVARAVEEGARVAFGGKAVEGKGYYYPPTLLLDVRQEMSIMHEETFGPVLPVVAFDTLEDAISMANDSDYGLTSSIYTQNLNVAMKAIKGLKFGETYINRENFEAMQGFHAGWRKSGIGGADGKHGLHEYLQTQVVYLQS

SEQ ID NO: 444 - protein, 548 aa, Escherichia coli
MSNKPFHYQAPFPLKKDDTEYYLLTSEHVSVSEFEGQEILKVAPEALTLLARQAFHDASFMLRPAHQQQVADILRDPEASENDKYVALQFLRNSDIAAKGVLPTCQDTGTAIIVGKKGQRVWTGGGDEAALARGVYNTYIEDNLRYSQNAPLDMYKEVNTGTNLPAQIDLYAVDGDEYKFLCIAKGGGSANKTYLYQETKALLTPGKLKNYLVEKMRTLGTAACPPYHIAFVIGGTSAETNLKTVKLASAKYYDELPTEGNEHGQAFRDVELEKELLIEAQNLGLGAQFGGKYFAHDIRVIRLPRHGASCPVGMGVSCSADRNIKAKINRQGIWIEKLEHNPGKYIPEELRKAGEGEAVRVDLNRPMKEILAQLSQYPVSTRLSLNGTIIVGRDIAHAKLKERMDNGEGLPQYIKDHPIYYAGPAKTPEGYASGSLGPTTAGRMDSYVDQLQAQGGSMIMLAKGNRSQQVTDACKKHGGFYLGSIGGPAAVLAQGSIKSLECVEYPELGMEAIWKIEVEDFPAFILVDDKGNDFFQQIQLTQCTRCVK

SEQ ID NO: 445 - protein, 548 aa, Escherichia coli
MSNKPFIYQAPFPMGKDNTEYYLLTSDYVSVADFDGETILKVEPEALTLLAQQAFHDASFMLRPAHQKQVAAILHDPEASENDKYVALQFLRNSEIAAKGVLPTCQDTGTAIIVGKKGQRVWTGGGDEETLSKGVYNTYIEDNLRYSQNAALDMYKEVNTGTNLPAQIDLYAVDGDEYKFLCVAKGGGSANKTYLYQETKALLTPGKLKNFLVEKMRTLGTAACPPYHIAFVIGGTSAETNLKTVKLASAHYYDELPTEGNEHGQAFRDVQLEQELLEEAQKLGLGAQFGGKYFAHDIRVIRLPRHGASCPVGMGVSCSADRNIKAKINREGIWIEKLEHNPGQYIPQELRQAGEGEAVKVDLNRPMKEILAQLSQYPVSTRLSLTGTIIVGRDIAHAKLKELIDAGKELPQYIKDHPIYYAGPAKTPAGYPSGSLGPTTAGRMDSYVDLLQSHGGSMIMLAKGNRSQQVTDACHKHGGFYLGSIGGPAAVLAQQSIKHLECVAYPELGMEAIWKIEVEDFPAFILVDDKGNDFFQQIVNKQCANCTK

SEQ ID NO: 446 - protein, 420 aa, Escherichia coli
MNTVRSEKDSMGAIDVPADKLWGAQTQRSLEHFRISTEKMPTSLIHALALTKRAAAKVNEDLGLLSEEKASAIRQAADEVLAGQHDDEFPLAIWQTGSGTQSNMNMNEVLANRASELLGGVRGMERKVHPNDDVNKSQSSNDVFPTAMHVAALLALRKQLIPQLKTLTQTLNEKSRAFADIVKIGRTHLQDATPLTLGQEISGWVAMLEHNLKHIEYSLPHVAELALGGTAVGTGLNTHPEYARRVADELAVITCAPFVTAPNKFEALATCDALVQAHGALKGLAASLMKIANDVRWLASGPRCGIGEISIPENEPGSSIMPGKVNPTQCEALTMLCCQVMGNDVAINMGGASGNFELNVFRPMVIHNFLQSVRLLADGMESFNKHCAVGIEPNRERINQLLNESLMLVTALNTHIGYDK

SEQ ID NO: 447 - protein, 396 aa, Escherichia coli
MFENITAAPADPILGLADLFRADERPGKINLGIGVYKDETGKTPVLTSVKKAEQYLLENETTKNYLGIDGIPEFGRCTQELLFGKGSALINDKRARTAQTPGGTGALRVAADFLAKNTSVKRVWVSNPSWPNHKSVFNSAGLEVREYAYYDAENHTLDFDALINSLNEAQAGDVVLFHGCCHNPTGIDPTLEQWQTLAQLSVEKGWLPLFDFAYQGFARGLEEDAEGLRAFAAMHKELIVASSYSKNFGLYNERVGACTLVAADSETVDRAFSQMKAAIRANYSNPPAHGASVVATILSNDALRAIWEQELTDMRQRIQRMRQLFVNTLQEKGANRDFSFIIKQNGMFSFSGLTKEQVLRLREEFGVYAVASGRVNVAGMTPDNMAPLCEAIVAVL

SEQ ID NO: 448 - protein, 312 aa, Escherichia coli
MKVAVLGAAGGIGQALALLLKTQLPSGSELSLYDIAPVTPGVAVDLSHIPTAVKIKGFSGEDATPALEGADVVLISAGVARKPGMDRSDLFNVNAGIVKNLVQQVAKTCPKACIGIITNPVNTTVAIAAEVLKKAGVYDKNKLFGVTTLDIIRSNTFVAELKGKQPGEVEVPVIGGHSGVTILPLLSQVPGVSFTEQEVADLTKRIQNAGTEVVEAKAGGGSATLSMGQAAARFGLSLVRALQGEQGVVECAYVEGDGQYARFFSQPLLLGKNGVEERKSIGTLSAFEQNALEGMLDTLKKDIALGEEFVNK

SEQ ID NO: 449 - protein, 356 aa, Escherichia coli
MQKDALNNVHITDEQVLMTPEQLKAAFPLSLQQEAQIADSRKSISDIIAGRDPRLLVVCGPCSIHDPETALEYARRFKALAAEVSDSLYLVMRVYFEKPRTTVGWKGLINDPHMDGSFDVEAGLQIARKLLLELVNMGLPLATEALDPNSPQYLGDLFSWSAIGARTTESQTHREMASGLSMPVGFKNGTDGSLATAINAMRAAAQPHRFVGINQAGQVALLQTQGNPDGHVILRGGKAPNYSPADVAQCEKEMEQAGLRPSLMVDCSHGNSNKDYRRQPAVAESVVAQIKDGNRSIIGLMIESNIHEGNQSSEQPRSEMKYGVSVTDACISWEMTDALLREIHQDLNGQLTARVA

SEQ ID NO: 450 - protein, 350 aa, Escherichia coli
MNYQNDDLRIKEIKELLPPVALLEKFPATENAANTVAHARKAIHKILKGNDDRLLVVIGPCSIHDPVAAKEYATRLLALREELKDELEIVMRVYFEKPRTTVGWKGLINDPHMDNSFQINDGLRIARKLLLDINDSGLPAAGEFLDMITPQYLADLMSWGAIGARTTESQVHRELASGLSCPVGFKNGTDGTIKVAIDAINAAGAPHCFLSVTKWGHSAIVNTSGNGDCHIILRGGKEPNYSAKHVAEVKEGLNKAGLPAQVMIDFSHANSSKQFKKQMDVCADVCQQIAGGEKAIIGVMVESHLVEGNQSLESGEPLAYGKSITDACIGWEDTDALLRQLANAVKARRG

SEQ ID NO: 451 - protein, 348 aa, Escherichia coli
MNRTDELRTARIESLVTPAELALRYPVTPGVATHVTDSRRRIEKILNGEDKRLLVIIGPCSIHDLTAAMEYATRLQSLRNQYQSRLEIVMRTYFEKPRTVVGWKGLISDPDLNGSYRVNHGLELARKLLLQVNELGVPTATEFLDMVTGQFIADLISWGAIGARTTESQIHREMASALSCPVGFKNGTDGNTRIAVDAIRAARASHMFLSPDKNGQMTIYQTSGNPYGHIIMRGGKKPNYHADDIAAACDTLHEFDLPEHLVVDFSHGNCQKQHRRQLEVCEDICQQIRNGSTAIAGIMAESFLREGTQKIVGSQPLTYGQSITDPCLGWEDTERLVEKLASAVDTRF

SEQ ID NO: 452 - protein, 362 aa, Escherichia coli
MERIVVTLGERSYPITIASGLFNEPASFLPLKSGEQVMLVTNETLAPLYLDKVRGVLEQAGVNVDSVILPDGEQYKSLAVLDTVFTALLQKPHGRDTTLVALGGGVVGDLTGFAAASYQRGVRFIQVPTTLLSQVDSSVGGKTAVNHPLGKNMIGAFYQPASVVVDLDCLKTLPPRELASGLAEVIKYGIILDGAFFNWLEENLDALLRLDGPAMAYCIRRCCELKAEVVAADERETGLRALLNLGHTFGHAIEAEMGYGNWLHGEAVAAGMVMAARTSERLGQFSSAETQRIITLLKRAGLPVNGPREMSAQAYLPHMLRDKKVLAGEMRLILPLAIGKSEVRSGVSHELVLNAIADCQSA

SEQ ID NO: 453 - protein, 252 aa, Escherichia coli
MKTVTVKDLVIGTGAPKIIVSLMAKDIASVKSEALAYREADFDILEWRVDHYADLSNVESVMAAAKILRETMPEKPLLFTFRSAKEGGEQAISTEAYIALNRAAIDSGLVDMIDLELFTGDDQVKETVAYAHAHDVKVVMSNHDFHKTPEAEEIIARLRKMQSFDADIPKIALMPQSTSDVLTLLAATLEMQEQYADRPIITMSMAKTGVISRLAGEVFGSAATFGAVKKASAPGQISVNDLRTVLTILHQA

SEQ ID NO: 454 - protein, 288 aa, Escherichia coli
MDVTAKYELIGLMAYPIRHSLSPEMQNKALEKAGLPFTYMAFEVDNDSFPGAIEGLKALKMRGTGVSMPNKQLACEYVDELTPAAKLVGAINTIVNDDGYLRGYNTDGTGHIRAIKESGFDIKGKTMVLLGAGGASTAIGAQGAIEGLKEIKLFNRRDEFFDKALAFAQRVNENTDCVVTVTDLADQQAFAEALASADILTNGTKVGMKPLENESLVNDISLLHPGLLVTECVYNPHMTKLLQQAQQAGCKTIDGYGMLLWQGAEQFTLWTGKDFPLEYVKQVMGFGA

SEQ ID NO: 455 - protein, 272 aa, Escherichia coli
METYAVFGNPIAHSKSPFIHQQFAQQLNIEHPYGRVLAPINDFINTLNAFFSAGGKGANVTVPFKEEAFARADELTERAALAGAVNTLMRLEDGRLLGDNTDGVGLLSDLERLSFIRPGLRILLIGAGGASRGVLLPLLSLDCAVTITNRTVSRAEELAKLFAHTGSIQALSMDELEGHEFDLIINATSSGISGDIPAIPSSLIHPGIYCYDMFYQKGKTPFLAWCEQRGSKRNADGLGMLVAQAAHAFLLWHGVLPDVEPVIKQLQEELSA

SEQ ID NO: 456 - protein, 173 aa, Escherichia coli
MAEKRNIFLVGPMGAGKSTIGRQLAQQLNMEFYDSDQEIEKRTGADVGWVFDLEGEEGFRDREEKVINELTEKQGIVLATGGGSVKSRETRNRLSARGVVVYLETTIEKQLARTQRDKKRPLLHVETPPREVLEALANERNPLYEEIADVTIRTDDQSAKVVANQIIHMLESN

SEQ ID NO: 457 - protein, 174 aa, Escherichia coli
MTQPLFLIGPRGCGKTTVGMALADSLNRRFVDTDQWLQSQLNMTVAEIVEREEWAGFRARETAALEAVTAPSTVIATGGGIILTEFNRHFMQNNGIVVYLCAPVSVLVNRLQAAPEEDLRPTLTGKPLSEEVQEVLEERDALYREVAHIIIDATNEPSQVISEIRSALAQTINC

SEQ ID NO: 458 - protein, 427 aa, Escherichia coli
MESLTLQPIARVDGTINLPGSKSVSNRALLLAALAHGKTVLTNLLDSDDVRHMLNALTALGVSYTLSADRTRCEIIGNGGPLHAEGALELFLGNAGTAMRPLAAALCLGSNDIVLTGEPRMKERPIGHLVDALRLGGAKITYLEQENYPPLRLQGGFTGGNVDVDGSVSSQFLTALLMTAPLAPEDTVIRIKGDLVSKPYIDITLNLMKTFGVEIENQHYQQFVVKGGQSYQSPGTYLVEGDASSASYFLAAAAIKGGTVKVTGIGRNSMQGDIRFADVLEKMGATICWGDDYISCTRGELNAIDMDMNHIPDAAMTIATAALFAKGTTTLRNIYNWRVKETDRLFAMATELRKVGAEVEEGHDYIRITPPEKLNFAEIATYNDHRMAMCFSLVALSDTPVTILDPKCTAKTFPDYFEQLARISQAA

SEQ ID NO: 459 - protein, 361 aa, Escherichia coli
MAGNTIGQLFRVTTFGESHGLALGCIVDGVPPGIPLTEADLQHDLDRRRPGTSRYTTQRREPDQVKILSGVFEGVTTGTSIGLLIENTDQRSQDYSAIKDVFRPGHADYTYEQKYGLRDYRGGGRSSARETAMRVAAGAIAKKYLAEKFGIEIRGCLTQMGDIPLDIKDWSQVEQNPFFCPDPDKIDALDELMRALKKEGDSIGAKVTVVASGVPAGLGEPVFDRLDADIAHALMSINAVKGVEIGDGFDVVALRGSQNRDEITKDGFQSNHAGGILGGISSGQQIIAHMALKPTSSITVPGRTINRFGEEVEMITKGRHDPCVGIRAVPIAEAMLAIVLMDHLLRQRAQNADVKTDIPRW

SEQ ID NO: 460 - protein, 187 aa, Escherichia coli
MILLIDNYDSFTWNLYQYFCELGADVLVKRNDALTLADIDALKPQKIVISPGPCTPDEAGISLDVIRHYAGRLPILGVCLGHQAMAQAFGGKVVRAAKVMHGKTSPITHNGEGVFRGLANPLTVTRYHSLVVEPDSLPACFDVTAWSETREIMGIRHRQWDLEGVQFHPESILSEQGHQLLANFLHR

SEQ ID NO: 461 - protein, 453 aa, Escherichia coli
MKTLSPAVITLLWRQDAAEFYFSRLSHLPWAMLLHSGYADHPYSRFDIVVAEPICTLTTFGKETVVSESEKRTTTTDDPLQVLQQVLDRADIRPTHNEDLPFQGGALGLFGYDLGRRFESLPEIAEQDIVLPDMAVGIYDWALIVDHQRHTVSLLSHNDVNARRAWLESQQFSPQEDFTLTSDWQSNMTREQYGEKFRQVQEYLHSGDCYQVNLAQRFHATYSGDEWQAFLQLNQANRAPFSAFLRLEQGAILSLSPERFILCDNSEIQTRPIKGTLPRLPDPQEDSKQAVKLANSAKDRAENLMIVDLMRNDIGRVAVAGSVKVPELFVVEPFPAVHHLVSTITAQLPEQLHASDLLRAAFPGGSITGAPKVRAMEIIDELEPQRRNAWCGSIGYLSFCGNMDTSITIRTLTAINGQIFCSAGGGIVADSQEEAEYQETFDKVNRILKQLEK

SEQ ID NO: 462 - protein, 373 aa, Escherichia coli
MVAELTALRDQIDEVDKALLNLLAKRLELVAEVGEVKSRFGLPIYVPEREASMLASRRAEAEALGVPPDLIEDVLRRVMRESYSSENDKGFKTLCPSLRPVVIVGGGGQMGRLFEKMLTLSGYQVRILEQHDWDRAADIVADAGMVIVSVPIHVTEQVIGKLPPLPKDCILVDLASVKNGPLQAMLVAHDGPVLGLHPMFGPDSGSLAKQVVVWCDGRKPEAYQWFLEQIQVWGARLHRISAVEHDQNMAFIQALRHFATFAYGLHLAEENVQLEQLLALSSPIYRLELAMVGRLFAQDPQLYADIIMSSERNLALIKRYYKRFGEAIELLEQGDKQAFIDSFRKVEHWFGDYAQRFQSESRVLLRQANDNRQ

SEQ ID NO: 463 - protein, 386 aa, Escherichia coli
MTSENPLLALREKISALDEKLLALLAERRELAVEVGKAKLLSHRPVRDIDRERDLLERLITLGKAHHLDAHYITRLFQLIIEDSVLTQQALLQQHLNKINPHSARIAFLGPKGSYSHLAARQYAARHFEQFIESGCAKFADIFNQVETGQADYAVVPIENTSSGAINDVYDLLQHTSLSIVGEMTLTIDHCLLVSGTTDLSTINTVYSHPQPFQQCSKFLNRYPHWKIEYTESTSAAMEKVAQAKSPHVAALGSEAGGTLYGLQVLERIEANQRQNFTRFVVLARKAINVSDQVPAKTTLLMATGQQAGALVEALLVLRNHNLIMTRLESRPIHGNPWEEMFYLDIQANLESAEMQKALKELGEITRSMKVLGCYPSENVVPVDPT

SEQ ID NO: 464 - protein, 397 aa, Escherichia coli
MFQKVDAYAGDPILTLMERFKEDPRSDKVNLSIGLYYNEDGIIPQLQAVAEAEARLNAQPHGASLYLPMEGLNCYRHAIAPLLFGADHPVLKQQRVATIQTLGGSGALKVGADFLKRYFPESGVWVSDPTWENHVAIFAGAGFEVSTYPWYDEATNGVRFNDLLATLKTLPARSIVLLHPCCHNPTGADLTNDQWDAVIEILKARELIPFLDIAYQGFGAGMEEDAYAIRAIASAGLPALVSNSFSKIFSLYGERVGGLSVMCEDAEAAGRVLGQLKATVRRNYSSPPNFGAQVVAAVLNDEALKASWLAEVEEMRTRILAMRQELVKVLSTEMPERNFDYLLNQRGMFSYTGLSAAQVDRLREEFGVYLIASGRMCVAGLNTANVQRVAKAFAAVM

SEQ ID NO: 465 - protein, 396 aa, Escherichia coli; identical to SEQ ID NO: 447

SEQ ID NO: 466 - protein, 290 aa, Escherichia coli
MEWSLTQNKLLAFHRLMRTDKPIGALLLLWPTLWALWVATPGVPQLWILAVFVAGVWLMRAAGCVVNDYADRKFDGHVKRTANRPLPSGAVTEKEARALFVVLVLISFLLVLTLNTMTILLSIAALALAWVYPFMKRYTHLPQVVLGAAFGWSIPMAFAAVSESVPLSCWLMFLANILWAVAYDTQYAMVDRDDDVKIGIKSTAILFGQYDKLIIGILQIGVLALMAIIGELNGLGWGYYWSILVAGALFVYQQKLIANREREACFKAFMNNNYVGLVLFLGLAMSYWHF

SEQ ID NO: 467 - protein, 165 aa, Escherichia coli
MSHPALTQLRALRYCKEIPALDPQLLDWLLLEDSMTKRFEQQGKTVSVTMIREGFVEQNEIPEELPLLPKESRYWLREILLCADGEPWLAGRTVVPVSTLSGPELALQKLGKTPLGRYLFTSSTLTRDFIEIGRDAGLWGRRSRLRLSGKPLLLTELFLPASPLY

SEQ ID NO: 468 - protein, 189 aa, Escherichia coli
MKRLIVGISGASGAIYGVRLLQVLRDVTDIETHLVMSQAARQTLSLETDFSLREVQALADVTHDARDIAASISSGSFQTLGMVILPCSIKTLSGIVHSYTDGLLTRAADVVLKERRPLVLCVRETPLHLGHLRLMTQAAEIGAVIMPPVPAFYHRPQSLDDVINQTVNRVLDQFAITLPEDLFARWQGA

SEQ ID NO: 469 - protein, 497 aa, Escherichia coli
MDAMKYNDLRDFLTLLEQQGELKRITLPVDPHLEITEIADRTLRAGGPALLFENPKGYSMPVLCNLFGTPKRVAMGMGQEDVSALREVGKLLAFLKEPEPPKGFRDLFDKLPQFKQVLNMPTKRLRGAPCQQKIVSGDDVDLNRIPIMTCWPEDAAPLITWGLTVTRGPHKERQNLGIYRQQLIGKNKLIMRWLSHRGGALDYQEWCAAHPGERFPVSVALGADPATILGAVTPVPDTLSEYAFAGLLRGTKTEVVKCISNDLEVPASAEIVLEGYIEQGETAPEGPYGDHTGYYNEVDSFPVFTVTHITQREDAIYHSTYTGRPPDEPAVLGVALNEVFVPILQKQFPEIVDFYLPPEGCSYRLAVVTIKKQYAGHAKRVMMGVWSFLRQFMYTKFVIVCDDDVNARDWNDVIWAITTRMDPARDTVLVENTPIDYLDFASPVSGLGSKMGLDATNKWPGETQREWGRPIKKDPDVVAHIDAIWDELAIFNNGKSA

SEQ ID NO: 470 - protein, 546 aa, Escherichia coli
MTPGEVRRLYFIIRTFLSYGLDELIPKMRITLPLRLWRYSLFWMPNRHKDKLLGERLRLALQELGPVWIKFGQMLSTRRDLFPPHIADQLALLQDKVAPFDGKLAKQQIEAAMGGLPVEAWFDDFEIKPLASASIAQVHTARLKSNGKEVVIKVIRPDILPVIKADLKLIYRLARWVPRLLPDGRRLRPTEVVREYEKTLIDELNLLRESANAIQLRRNFEDSPMLYIPEVYPDYCSEGMMVMERIYGIPVSDVAALEKNGTNMKLLAERGVQVFFTQVFRDSFFHADMHPGNIFVSYEHPENPKYIGIDCGIVGSLNKEDKRYLAENFIAFFNRDYRKVAELHVDSGWVPPDTNVEEFEFAIRTVCEPIFEKPLAEISFGHVLLNLFNTARRFNMEVQPQLVLLQKTLLYVEGVGRQLYPQLDLWKTAKPFLESWIKDQVGIPALVRAFKEKAPFWVEKMPELPELVYDSLRQGKYLQHSVDKIARELQSNHVRQGQSRYFLGIGATLVLSGTFLLVSRPEWGLMPGWLMAGGLIAWFVGWRKTR

SEQ ID NO: 471 - protein, 240 aa, Escherichia coli
MNAEKSPVNHNVDHEEIAKFEAVASRWWDLEGEFKPLHRINPLRLGYIAERAGGLFGKKVLDVGCGGGILAESMAREGATVTGLDMGFEPLQVAKLHALESGIQVDYVQETVEEHAAKHAGQYDVVTCMEMLEHVPDPQSVVRACAQLVKPGGDVFFSTLNRNGKSWLMAVVGAEYILRMVPKGTHDVKKFIKPAELLGWVDQTSLKERHITGLHYNPITNTFKLGPGVDVNYMLHTQNK

SEQ ID NO: 472 - protein, 392 aa, Escherichia coli [sequence omitted]

SEQ ID NO: 473 - protein, 251 aa, Escherichia coli
MVDKSQETTHFGFQTVAKEQKADMVAHVFHSVASKYDVMNDLMSFGIHRLWKRFTIDCSGVRRGQTVLDLAGGTGDLTAKFSRLVGETGKVVLADINESMLKMGREKLRNIGVIGNVEYVQANAEALPFPDNTFDCITISFGLRNVTDKDKALRSMYRVLKPGGRLLVLEFSKPIIEPLSKAYDAYSFHVLPRIGSLVANDADSYRYLAESIRMHPDQDTLKAMMQDAGFESVDYYNLTAGVVALHRGYKF

SEQ ID NO: 474 - protein, 391 aa, Escherichia coli
MTNQPTEIAIVGGGMVGGALALGLAQHGFAVTVIEHAEPAPFVADSQPDVRISAISAASVSLLKGLGVWDAVQAMRCHPYRRLETWEWETAHVVFDAAELKLPLLGYMVENTVLQQALWQALEAHPKVTLRVPGSLIALHRHDDLQELELKGGEVIRAKLVIGADGANSQVRQMAGIGVHAWQYAQSCMLISVQCENDPGDSTWQQFTPDGPRAFLPLFDNWASLVWYDSPARIRQLQNMNMAQLQAEIAKHFPSRLGYVTPLAAGAFPLTRRHALQYVQPGLALVGDAAHTIHPLAGQGVNLGYRDVDALIDVLVNARSYGEAWASYPVLKRYQMRRMADNFIMQSGMDLFYAGFSNNLPPLRFMRNLGLMAAERAGVLKRQALKYALGL

SEQ ID NO: 475 - protein, 531 aa, Escherichia coli
MADILLLDNIDSFTYNLADQLRSNGHNVVIYRNHIPAQTLIERLATMSNPVLMLSPGPGVPSEAGCMPELLTRLRGKLPIIGICLGHQAIVEAYGGYVGQAGEILHGKASSIEHDGQAMFAGLTNPLPVARYHSLVGSNIPAGLTINAHFNGMVMAVRHDADRVCGFQFHPESILTTQGARLLEQTLAWAQQKLEPANTLQPILEKLYQAQTLSQQESHQLFSAVVRGELKPEQLAAALVSMKIRGEHPNEIAGAATALLENAAPFPRPDYLFADIVGTGGDGSNSINISTASAFVAAACGLKVAKHGNRSVSSKSGSSDLLAAFGINLDMNADKSRQALDELGVCFLFAPKYHTGFRHAMPVRQQLKTRTLFNVLGPLINPAHPPLALIGVYSPELVLPIAETLRVLGYQRAAVVHSGGMDEVSLHAPTIVAELHDGEIKSYQLTAEDFGLTPYHQEQLAGGTPEENRDILTRLLQGKGDAAHEAAVAANVAMLMRLHGHEDLQANAQTVLEVLRSGSAYDRVTALAARG

SEQ ID NO: 476 - protein, 520 aa, Escherichia coli
MQTQKPTLELLTCEGAYRDNPTALFHQLCGDRPATLLLESADIDSKDDLKSLLLVDSALRITALGDTVTIQALSGNGEALLALLDNALPAGVESEQSPNCRVLRFPPVSPLLDEDARLCSLSVFDAFRLLQNLLNVPKEEREAMFFGGLFSYDLVAGFEDLPQLSAENNCPDFCFYLAETLMVIDHQKKSTRIQASLFAPNEEEKQRLTARLNELRQQLTEAAPPLPVVSVPHMRCECNQSDEEFGGVVRLLQKAIRAGEIFQVVPSRRFSLPCPSPLAAYYVLKKSNPSPYMFFMQDNDFTLFGASPESSLKYDATSRQIEIYPIAGTRPRGRRADGSLDRDLDSRIELEMRTDHKELSEHLMLVDLARNDLARICTPGSRYVADLTKVDRYSYVMHLVSRVVGELRHDLDALHAYRACMNMGTLSGAPKVRAMQLIAEAEGRRRGSYGGAVGYFTAHGDLDTCIVIRSALVENGIATVQAGAGVVLDSVPQSEADETRNKARAVLRAIATAHHAQETF

SEQ ID NO: 477 - protein, 452 aa, Escherichia coli
MQTVLAKIVADKAIWVEARKQQQPLASFQNEVQPSTRHFYDALQGARTAFILECKKASPSKGVIRDDFDPARIAAIYKHYASAISVLTDEKYFQGSFNFLPIVSQIAPQPILCKDFIIDPYQIYLARYYQADACLLMLSVLDDDQYRQLAAVAHSLEMGVLTEVSNEEEQERAIALGAKVVGINNRDLRDLSIDLNRTRELAPKLGHNVTVISESGINTYAQVRELSHFANGFLIGSALMAHDDLHAAVRRVLLGENKVCGLTRGQDAKAAYDAGAIYGGLIFVATSPRCVNVEQAQEVMAAAPLQYVGVFRNHDIADVVDKAKVLSLAAVQLHGNEEQLYIDTLREALPAHVAIWKALSVGETLPAREFQHVDKYVLDNGQGGSGQRFDWSLLNGQSLGNVLLAGGLGADNCVEAAQTGCAGLDFNSAVESQPGIKDARLLASVFQTLRAY

SEQ ID NO: 478 - protein, 268 aa, Escherichia coli
MERYESLFAQLKERKEGAFVPFVTLGDPGIEQSLKIIDTLIEAGADALELGIPFSDPLADGPTIQNATLRAFAAGVTPAQCFEMLALIRQKHPTIPIGLLMYANLVFNKGIDEFYAQCEKVGVDSVLVADVPVEESAPFRQAALRHNVAPIFICPPNADDDLLRQIASYGRGYTYLLSRAGVTGAENRAALPLNHLVAKLKEYNAAPPLQGFGISAPDQVKAAIDAGAAGAISGSAIVKIIEQHINEPEKMLAALKVFVQPMKAATRS

SEQ ID NO: 479 - protein, 397 aa, Escherichia coli [sequence omitted]

SEQ ID NO: 480 - protein, 431 aa, Escherichia coli
MQSLTTALENLLRHLSQEIPATPGIRVIDIPFPLKDAFDALSWLASQQTYPQFYWQQRNGDEEAVVLGAITRFTSLDQAQRFLRQHPEHADLRIWGLNAFDPSQGNLLLPRLEWRRCGGKATLRLTLFSESSLQHDAIQAKEFIATLVSIKPLPGLHLTTTREQHWPDKTGWTQLIELATKTIAEGELDKVVLARATDLHFASPVNAAAMMAASRRLNLNCYHFYMAFDGENAFLGSSPERLWRRRDKALRTEALAGTVANNPDDKQAQQLGEWLMADDKNQRENMLVVEDICQRLQADTQTLDVLPPQVLRLRKVQHLRRCIWTSLNKADDVICLHQLQPTAAVAGLPRDLARQFIARHEPFTREWYAGSAGYLSLQQSEFCVSLRSAKISGNVVRLYAGAGIVRGSDPEQEWQEIDNKAAGLRTLLQME

SEQ ID NO: 481 - protein, 391 aa, Escherichia coli
MDTSLAEEVQQTMATLAPNRFFFMSPYRSFTTSGCFARFDEPAVNGDSPDSPFQQKLAALFADAKAQGIKNPVMVGAIPFDPRQPSSLYIPESWQSFSRQEKQASARRFTRSQSLNVVERQAIPEQTTFEQMVARAAALTATPQVDKVVLSRLIDITTDAAIDSGVLLERLIAQNPVSYNFHVPLADGGVLLGASPELLLRKDGERFSSIPLAGSARRQPDEVLDREAGNRLLASEKDRHEHELVTQAMKEVLRERSSELHVPSSPQLITTPTLWHLATPFEGKANSQENALTLACLLHPTPALSGFPHQAATQVIAELEPFDRELFGGIVGWCDSEGNGEWVVTIRCAKLRENQVRLFAGAGIVPASSPLGEWRETGVKLSTMLNVFGLH

SEQ ID NO: 482 - protein, 536 aa, Escherichia coli
MSIPFTRWPEEFARRYREKGYWQDLPLTDILTRHAASDSIAVIDGERQLSYRELNQAADNLACSLRRQGIKPGETALVQLGNVAELYITFFALLKLGVAPVLALFSHQRSELNAYASQIEPALLIADRQHALFSGDDFLNTFVTEHSSIRVVQLLNDSGEHNLQDAINHPAEDFTATPSPADEVAYFQLSGGTTGTPKLIPRTHNDYYYSVRRSVEICQFTQQTRYLCAIPAAHNYAMSSPGSLGVFLAGGTVVLAADPSATLCFPLIEKHQVNVTALVPPAVSLWLQALIEGESRAQLASLKLLQVGGARLSATLAARIPAEIGCQLQQVFGMAEGLVNYTRLDDSAEKIIHTQGYPMCPDDEVWVADAEGNPLPQGEVGRLMTRGPYTFRGYYKSPQHNASAFDANGFYCSGDLISIDPEGYITVQGREKDQINRGGEKIAAEEIENLLLRHPAVIYAALVSMEDELMGEKSCAYLVVKEPLRAVQVRRFLREQGIAEFKLPDRVECVDSLPLTAVGKVDKKQLRQWLASRASA

SEQ ID NO: 483 - protein, 1293 aa, Escherichia coli
MSQHLPLVAAQPGIWMAEKLSELPSAWSVAHYVELTGEVDSPLLARAVVAGLAQADTLRMRFTEDNGEVWQWVDDALTFELPEIIDLRTNIDPHGTAQALMQADLQQDLRVDSGKPLVFHQLIQVADNRWYWYQRYHHLLVDGFSFPAITRQIANIYCTWLRGEPTPASPFTPFADVVEEYQQYRESEAWQRDAAFWAEQRRQLPPPASLSPAPLPGRSASADILRLKLEFTDGEFRQLATQLSGVQRTDLALALAALWLGRLCNRMDYAAGFIFMRRLGSAALTATGPVLNVLPLGIHIAAQETLPELATRLAAQLKKMRRHQRYDAEQIVRDSGRAAGDEPLFGPVLNIKVFDYQLDIPDVQAQTHTLATGPVNDLELALFPDVHGDLSIEILANKQRYDEPTLIQHAERLKMLIAQFAADPALLCGDVDIMLPGEYAQLAQLNATQVEIPETTLSALVAEQAAKTPDAPALADARYLFSYREMREQVVALANLLRERGVKPGDSVAVALPRSVFLTLALHAIVEAGAAWLPLDTGYPDDRLKMMLEDARPSLLITTDDQLPRFSDVPNLTSLCYNAPLTPQGSAPLQLSQPHHTAYIIFTSGSTGRPKGVMVGQTAIVNRLLWMQNHYPLTGEDVVAQKTPCSFDVSVWEFFWPFIAGAKLVMAEPEAHRDPLAMQQFFAEYGVTTTHFVPSMLAAFVASLTPQTARQSCATLKQVFCSGEALPADLCREWQQLTGAPLHNLYGPTEAAVDVSWYPAFGEELAQVRGSSVPIGYPVWNTGLRILDAMMHPVPPGVAGDLYLTGIQLAQGYLGRPDLTASRFIADPFAPGERMYRTGDVARWLDNGAVEYLGRSDDQLKIRGQRIELGEIDRVMQALPDVEQAVTHACVINQAAATGGDARQLVGYLVSQSGLPLDTSALQAQLRETLPPHMVPVVLLQLPQLPLSANGKLDRKALPLPELKAQAPGRAPKAGSETIIAAAFSSLLGCDVQDADADFFALGGHSLLAMKLAAQLSRQVARQVTPGQVMVASTVAKLATIIDAEEDSTRRMGFETILPLREGNGPTLFCFHPASGFAWQFSVLSRYLDPQWSIIGIQSPRPNGPMQTAANLDEVCEAHLATLLEQQPHGPYYLLGYSLGGTLAQGIAARLRARGEQVAFLGLLDTWPPETQNWQEKEANGLDPEVLAEINREREAFLAAQQGSTSTELFTTIEGNYADAVRLLTTAHSVPFDGKATLFVAERTLQEGMSPERAWSPWIAELDIYRQDCAHVDIISPGTFEKIGPIIRATLNR

SEQ ID NO: 484 - protein, 209 aa, Escherichia coli
MVDMKTTHTSLPFAGHTLHFVEFDPANFCEQDLLWLPHYAQLQHAGRKRKTEHLAGRIAAVYALREYGYKCVPAIGELRQPVWPAEVYGSISHCGTTALAVVSRQPIGIDIEEIFSVQTARELTDNIITPAEHERLADCGLAFSLALTLAFSAKESAFKASEIQTDAGFLDYQIISWNKQQVIIHRENEMFAVHWQIKEKIVITLCQHD

SEQ ID NO: 485 - protein, 285 aa, Escherichia coli
MAIPKLQAYALPESHDIPQNKVDWAFEPQRAALLIHDMQDYFVSFWGENCPMMEQVIANIAALRDYCKQHNIPVYYTAQPKEQSDEDRALLNDMWGPGLTRSPEQQKVVDRLTPDADDTVLVKWRYSAFHRSPLEQMLKESGRNQLIITGVYAHIGCMTTATDAFMRDIKPFMVADALADFSRDEHLMSLKYVAGRSGRVVMTEELLPAPIPASKAALREVILPLLDESDEPFDDDNLIDYGLDSVRMMALAARWRKVHGDIDFVMLAKNPTIDAWWKLLSREVK

SEQ ID NO: 486 - protein, 556 aa, Escherichia coli
MSVSAFNRRWAAVILEALTRHGVRHICIAPGSRSTPLTLAAAENSAFIHHTHFDERGLGHLALGLAKVSKQPVAVIVTSGTAVANLYPALIEAGLTGEKLILLTADRPPELIDCGANQAIRQPGMFASHPTHSISLPRPTQDIPARWLVSTIDHALGTLHAGGVHINCPFAEPLYGEMDDTGLSWQQRLGDWWQDDKPWLREAPRLESEKQRDWFFWRQKRGVVVAGRMSAEEGKKVALWAQTLGWPLIGDVLSQTGQPLPCADLWLGNAKATSELQQAQIVVQLGSSLTGKRLLQWQASCEPEEYWIVDDIEGRLDPAHHRGRRLIANIADWLELHPAEKRQPWCVEIPRLAEQAMQAVIARRDAFGEAQLAHRICDYLPEQGQLFVGNSLVVRLIDALSQLPAGYPVYSNRGASGIDGLLSTAAGVQRASGKPTLAIVGDLSALYDLNALALLRQVSAPLVLIVVNNNGGQIFSLLPTPQSERERFYLMPQNVHFEHAAAMFELKYHRPQNWQELETAFADAWRTPTTTVIEMVVNDTDGAQTLQQLLAQVSHL

SEQ ID NO: 487 - protein, 252 aa, Escherichia coli
MILHAQAKHGKPGLPWLVFLHGFSGDCHEWQEVGEAFADYSRLYVDLPGHGGSAAISVDGFDDVTDLLRKTLVSYNILDFWLVGYSLGGRVAMMAACQGLAGLCGVIVEGGHPGLQNAEQRAERQRSDRQWVQRFLTEPLTAVFADWYQQPVFASLNDDQRRELVALRSNNNGATLAAMLEATSLAVQPDLRANLSARTFAFYYLCGERDSKFRALAAELAADCHVIPRAGHNAHRENPAGVIASLAQILRF

SEQ ID NO: 488 - protein, 320 aa, Escherichia coli
MRSAQVYRWQIPMDAGVVLRDRRLKTRDGLYVCLREGEREGWGEISPLPGFSQETWEEAQSVLLAWVNNWLAGDCELPQMPSVAFGVSCALAELTDTLPQAANYRAAPLCNGDPDDLILKLADMPGEKVAKVKVGLYEAVRDGMVVNLLLEAIPDLHLRLDANRAWTPLKGQQFAKYVNPDYRDRIAFLEEPCKTRDDSRAFARETGIAIAWDESLREPDFAFVAEEGVRAVVIKPTLTGSLEKVREQVQAAHALGLTAVISSSIESSLGLTQLARIAAWLTPDTIPGLDTLDLMQAQQVRRWPGSTLPVVEVDALERLL

SEQ ID NO: 489 - protein, 451 aa, Escherichia coli
MIFSDWPWRHWRQVRGETIALRLNDEQLNWRELCARVDELASGFAVQGVVEGSGVMLRAWNTPQTLLAWLALLQCGARVLPVNPQLPQPLLEELLPNLTLQFALVPDGENTFPALTSLHIQLVEGAHAATWQPTRLCSMTLTSGSTGLPKAAVHTYQAHLASAQGVLSLIPFGDHDDWLLSLPLFHVSGQGIMWRWLYAGARMTVRDKQPLEQMLAGCTHASLVPTQLWRLLVNRSSVSLKAVLLGGAAIPVELTEQAREQGIRCFCGYGLTEFASTVCAKEADGLADVGSPLPGREVKIVNNEVWLRAASMAEGYWRNGQLVSLVNDEGWYATRDRGEMHNGKLTIVGRLDNLFFSGGEGIQPEEVERVIAAHPAVLQVFIVPVADKEFGHRPVAVMEYDHESVDLSEWVKDKLARFQQPVRWLTLPPELKNGGIKISRQALKEWVQRQQ

SEQ ID NO: 490 - protein, 285 aa, Escherichia coli
MIYPDEAMLYAPVEWHDCSEGFEDIRYEKSTDGIAKITINRPQVRNAFRPLTVKEMIQALADARYDDNIGVIILTGAGDKAFCSGGDQKVRGDYGGYKDDSGVHHLNVLDFQRQIRTCPKPVVAMVAGYSIGGGHVLHMMCDLTIAADNAIFGQTGPKVGSFDGGWGASYMARIVGQKKAREIWFLCRQYDAKQALDMGLVNTVVPLADLEKETVRWCREMLQNSPMALRCLKAALNADCDGQAGLQELAGNATMLFYMTEEGQEGRNAFNQKRQPDFSKFKRNP

SEQ ID NO: 491 - protein, 308 aa, Escherichia coli
MTEQQISRTQAWLESLRPKTLPLAFAAIIVGTALAWWQGHFDPLVALLALITAGLLQILSNLANDYGDAVKGSDKPDRIGPLRGMQKGVITQQEMKRALIITVVLICLSGLALVAVACHTLADFVGFLILGGLSIIAAITYTVGNRPYGYIGLGDISVLVFFGWLSVMGSWYLQAHTLIPALILPATACGLLATAVLNINNLRDINSDRENGKNTLVVRLGEVNARRYHACLLMGSLVCLALFNLFSLHSLWGWLFLLAAPLLVKQARYVMREMDPVAMRPMLERTVKGALLTNLLFVLGIFLSQWAA

SEQ ID NO: 492 - protein, 222 aa, Escherichia coli
MPSLSKEAALVHEALVARGLETPLRPPVHEMDNETRKSLIAGHMTEIMQLLNLDLADDSLMETPHRIAKMYVDEIFSGLDYANFPKITLIENKMKVDEMVTVRDITLTSTCEHHFVTIDGKATVAYIPKDSVIGLSKINRIVQFFAQRPQVQERLTQQILIALQTLLGTNNVAVSIDAVHYCVKARGIRDATSATTTTSLGGLFKSSQNTRHEFLRAVRHHN

SEQ ID NO: 493 - protein, 150 aa, Escherichia coli
MKDKVYKRPVSILVVIYAQDTKRVLMLQRRDDPDFWQSVTGSVEEGETAPQAAMREVKEEVTIDVVAEQLTLIDCQRTVEFEIFSHLRHRYAPGVTRNTESWFCLALPHERQIVFTEHLAYKWLDAPAAAALTKSWSNRQAIEQFVINAA

SEQ ID NO: 494 - protein, 122 aa, Escherichia coli
MDIVFIEQLSVITTIGVYDWEQTIEQKLVFDIEMAWDNRKAAKSDDVADCLSYADIAETVVSHVEGARFALVERVAEEVAELLLARFNSPWVRIKLSKPGAVARAANVGVIIERGNNLKENN

SEQ ID NO: 495 - protein, 159 aa, Escherichia coli
MTVAYIAIGSNLASPLEQVNAALKALGDIPESHILTVSSFYRTPPLGPQDQPDYLNAAVALETSLAPEELLNHTQRIELQQGRVRKAERWGPRTLDLDIMLFGNEVINTERLTVPHYDMKNRGFMLWPLFEIAPELVFPDGEMLRQILHTRAFDKLNKW

SEQ ID NO: 496 - protein, 269 aa, Escherichia coli [sequence omitted]

SEQ ID NO: 497 - protein, 282 aa, Escherichia coli
MKLFAQGTSLDLSHPHVMGILNVTPDSFSDGGTHNSLIDAVKHANLMINAGATIIDVGGESTRPGAAEVSVEEELQRVIPVVEAIAQRFEVWISVDTSKPEVIRESAKVGAHIINDIRSLSEPGALEAAAETGLPVCLMHMQGNPKTMQEAPKYDDVFAEVNRYFIEQIARCEQAGIAKEKLLLDPGFGFGKNLSHNYSLLARLAEFHHFNLPLLVGMSRKSMIGQLLNVGPSERLSGSLACAVIAAMQGAHIIRVHDVKETVEAMRVVEATLSAKENKRYE

SEQ ID NO: 498 - protein, 422 aa, Escherichia coli
MIIKRTPQAASPLASWLSYLENLHSKTIDLGLERVSLVAARLGVLKPAPFVFTVAGTNGKGTTCRTLESILMAAGYKVGVYSSPHLVRYTERVRVQGQELPESAHTASFAEIESARGDISLTYFEYGTLSALWLFKQAQLDVVILEVGLGGRLDATNIVDADVAVVTSIALDHTDWLGPDRESIGREKAGIFRSEKPAIVGEPEMPSTIADVAQEKGALLQRRGVEWNYSVTDHDWAFSDAHGTLENLPLPLVPQPNAATALAALRASGLEVSENAIRDGIASAILPGRFQIVSESPRVIFDVAHNPHAAEYLTGRMKALPKNGRVLAVIGMLHDKDIAGTLAWLKSVVDDWYCAPLEGPRGATAEQLLEHLGNGKSFDSVAQAWDAAMADAKAEDTVLVCGSFHTVAHVMEVIDARRSGGK

SEQ ID NO: 499 - protein, 159 aa, Escherichia coli [sequence omitted]

SEQ ID NO: 500 - protein, 240 aa, Escherichia coli
MGKTQPLPILITGGGRRIGLALAWHFINQKQPVIVSYRTHYPAIDGLINAGAQCIQADFSTNDGVMAFADEVLKSTHGLRAILHNASAWMAEKPGAPLADVLACMMQIHVNTPYLLNHALERLLRGHGHAASDIIHFTDYVVERGSDKHIAYAASKAALDNMTRSFARKLAPEVKVNSIAPSLILFNEHDDAEYRQQALNKSLMKTAPGEKEVIDLVDYLLTSCFVTGRSFPLDGGRHLR

SEQ ID NO: 501 - protein, 212 aa, Escherichia coli
MNIVVLISGNGSNLQAIIDACKTNKIKGTVRAVFSNKADAFGLERARQAGIATHTLIASAFDSREAYDRELIHEIDMYAPDVVVLAGFMRILSPAFVSHYAGRLLNIHPSLLPKYPGLHTHRQALENGDEEHGTSVHFVTDELDGGPVILQAKVPVFAGDSEDDITARVQTQEHAIYPLVISWFADGRLKMHENAAWLDGQRLPPQGYAADE

SEQ ID NO: 502 - protein, 288 aa, Escherichia coli
MAAKIIDGKTIAQQVRSEVAQKVQARIAAGLRAPGLAVVLVGSNPASQIYVASKRKACEEVGFVSRSYDLPETTSEAELLELIDTLNADNTIDGILVQLPLPAGIDNVKVLERIHPDKDVDGFHPYNVGRLCQRAPRLRPCTPRGIVTLLERYNIDTFGLNAVVIGASNIVGRPMSMELLLAGCTTTVTHRFTKNLRHHVENADLLIVAVGKPGFIPGDWIKEGAIVIDVGINRLENGKVVGDVVFEDAAKRASYITPVPGGVGPMTVATLIENTLQACVEYHDPQDE

SEQ ID NO: 503 - protein, 440 aa, Escherichia coli
MVQCVRHFVLPRLKKDAGLPFFFPLITHSQPLNRGAFFCPGVRRMFENITAAPADPILGLADLFRADERPGKINLGIGVYKDETGKTPVLTSVKKAEQYLLENETTKNYLGIDGIPEFGRCTQELLFGKGSALINDKRARTAQTPGGTGALRVAADFLAKNTSVKRVWVSNPSWPNHKSVFNSAGLEVREYAYYDAENHTLDFDALINSLNEAQAGDVVLFHGCCHNPTGIDPTLEQWQTLAQLSVEKGWLPLFDFAYQGFARGLEEDAEGLRAFAAMHKELIVASSYSKNFGLYNERVGACTLVAADSETVDRAFSQMKAAIRANYSNPPAHGASVVATILSNDALRAIWEQELTDMRQRIQRMRQLFVNTLQEKGANRDFSFIIKQNGMFSFSGLTKEQVLRLREEFGVYAVASGRVNVAGMTPDNMAPLCEAIVAVL

SEQ ID NO: 504 - protein, 311 aa, Escherichia coli
MANPLYQKHIISINDLSRDDLNLVLATAAKLKANPQPELLKHKVIASCFFEASTRTRLSFETSMHRLGASVVGFSDSANTSLGKKGETLADTISVISTYVDAIVMRHPQEGAARLATEFSGNVPVLNAGDGSNQHPTQTLLDLFTIQETQGRLDNLHVAMVGDLKYGRTVHSLTQALAKFDGNRFYFIAPDALAMPQYILDMLDEKGIAWSLHSSIEEVMAEVDILYMTRVQKERLDPSEYANVKAQFVLRASDLHNAKANMKVLHPLPRVDEIATDVDKTPHAWYFQQAGNGIFARQALLALVLNRDLVL

SEQ ID NO: 505 - protein, 449 aa, Escherichia coli
MSEIVVSKFGGTSVADFDAMNRSADIVLSDANVRLVVLSASAGITNLLVALAEGLEPGERFEKLDAIRNIQFAILERLRYPNVIREEIERLLENITVLAEAAALATSPALTDELVSHGELMSTLLFVEILRERDVQAQWFDVRKVMRTNDRFGRAEPDIAALAELAALQLLPRLNEGLVITQGFIGSENKGRTTTLGRGGSDYTAALLAEALHASRVDIWTDVPGIYTTDPRVVSAAKRIDEIAFAEAAEMATFGAKVLHPATLLPAVRSDIPVFVGSSKDPRAGGTLVCNKTENPPLFRALALRRNQTLLTLHSLNMLHSRGFLAEVFGILARHNISVDLITTSEVSVALTLDTTGSTSTGDTLLTQSLLMELSALCRVEVEEGLALVALIGNDLSKACGVGKEVFGVLEPFNIRMICYGASSHNLCFLVPGEDAEQVVQKLHSNLFE

SEQ ID NO: 506 - protein, 810 aa, Escherichia coli
MSVIAQAGAKGRQLHKFGGSSLADVKCYLRVAGIMAEYSQPDDMMVVSAAGSTTNQLINWLKLSQTDRLSAHQVQQTLRRYQCDLISGLLPAEEADSLISAFVSDLERLAALLDSGINDAVYAEVVGHGEVWSARLMSAVLNQQGLPAAWLDAREFLRAERAAQPQVDEGLSYPLLQQLLVQHPGKRLVVTGFISRNNAGETVLLGRNGSDYSATQIGALAGVSRVTIWSDVAGVYSADPRKVKDACLLPLLRLDEASELARLAAPVLHARTLQPVSGSEIDLQLRCSYTPDQGSTRIERVLASGTGARIVTSHDDVCLIEFQVPASQDFKLAHKEIDQILKRAQVRPLAVGVHNDRQLLQFCYTSEVADSALKILDEAGLPGELRLRQGLALVAMVGAGVTRNPLHCHRFWQQLKGQPVEFTWQSDDGISLVAVLRTGPTESLIQGLHQSVFRAEKRIGLVLFGKGNIGSRWLELFAREQSTLSARTGFEFVLAGVVDSRRSLLSYDGLDASRALAFFNDEAVEQDEESLFLWMRAHPYDDLVVLDVTASQQLADQYLDFASHGFHVISANKLAGASDSNKYRQIHDAFEKTGRHWLYNATVGAGLPINHTVRDLIDSGDTILSISGIFSGTLSWLFLQFDGSVPFTELVDQAWQQGLTEPDPRDDLSGKDVMRKLVILAREAGYNIEPDQVRVESLVPAHCEGGSIDHFFENGDELNEQMVQRLEAAREMGLVLRYVARFDANGKARVGVEAVREDHPLASLLPCDNVFAIESRWYRDNPLVIRGPGAGRDVTAGAIQSDINRLAQLL

SEQ ID NO: 507 - protein, 820 aa, Escherichia coli
MRVLKFGGTSVANAERFLRVADILESNARQGQVATVLSAPAKITNHLVAMIEKTISGQDALPNISDAERIFAELLTGLAAAQPGFPLAQLKTFVDQEFAQIKHVLHGISLLGQCPDSINAALICRGEKMSIAIMAGVLEARGHNVTVIDPVEKLLAVGHYLESTVDIAESTRRIAASRIPADHMVLMAGFTAGNEKGELVVLGRNGSDYSAAVLAACLRADCCEIWTDVDGVYTCDPRQVPDARLLKSMSYQEAMELSYFGAKVLHPRTITPIAQFQIPCLIKNTGNPQAPGTLIGASRDEDELPVKGISNLNNMAMFSVSGPGMKGMVGMAARVFAAMSRARISVVLITQSSSEYSISFCVPQSDCVRAERAMQEEFYLELKEGLLEPLAVTERLAIISVVGDGMRTLRGISAKFFAALARANINIVAIAQGSSERSISVVVNNDDATTGVRVTHQMLFNTDQVIEVFVIGVGGVGGALLEQLKRQQSWLKNKHIDLRVCGVANSKALLTNVHGLNLENWQEELAQAKEPFNLGRLIRLVKEYHLLNPVIVDCTSSQAVADQYADFLREGFHVVTPNKKANTSSMDYYHQLRYAAEKSRRKFLYDTNVGAGLPVIENLQNLLNAGDELMKFSGILSGSLSYIFGKLDEGMSFSEATTLAREMGYTEPDPRDDLSGMDVARKLLILARETGRELELADIEIEPVLPAEFNAEGDVAAFMANLSQLDDLFAARVAKARDEGKVLRYVGNIDEDGVCRVKIAEVDGNDPLFKVKNGENALAFYSHYYQPLPLVLRGYGAGNDVTAAGVFADLLRTLSWKLGV

SEQ ID NO: 508 - protein, 367 aa, Escherichia coli
MKNVGFIGWRGMVGSVLMQRMVEERDFDAIRPVFFSTSQLGQAAPSFGGTTGTLQDAFDLEALKALDIIVTCQGGDYTNEIYPKLRESGWQGYWIDAASSLRMKDDAIIILDPVNQDVITDGLNNGIRTFVGGNCTVSLMLMSLGGLFANDLVDWVSVATYQAASGGGARHMRELLTQMGHLYGHVADELATPSSAILDIERKVTTLTRSGELPVDNFGVPLAGSLIPWIDKQLDNGQSREEWKGQAETNKILNTSSVIPVDGLCVRVGALRCHSQAFTIKLKKDVSIPTVEELLAAHNPWAKVVPNDREITMRELTPAAVTGTLTTPVGRLRKLNMGPEFLSAFTVGDQLLWGAAEPLRRMLRQLA

SEQ ID NO: 509 - protein, 292 aa, Escherichia coli
MFTGSIVAIVTPMDEKGNVCRASLKKLIDYHVASGTSAIVSVGTTGESATLNHDEHADVVMMTLDLADGRIPVIAGTGANATAEAISLTQRFNDSGIVGCLTVTPYYNRPSQEGLYQHFKAIAEHTDLPQILYNVPSRTGCDLLPETVGRLAKVKNIIGIKEATGNLTRVNQIKELVSDDFVLLSGDDASALDFMQLGGHGVISVTANVAARDMAQMCKLAAEGHFAEARVINQRLMPLHNKLFVEPNPIPVKWACKELGLVATDTLRLPMTPITDSGRETVRAALKHAGLL

SEQ ID NO: 510 - protein, 309 aa, Escherichia coli [sequence omitted]

SEQ ID NO: 511 - protein, 386 aa, Escherichia coli
MTRKQATIAVRSGLNDDEQYGCVVPPIHLSSTYNFTGFNEPRAHDYSRRGNPTRDVVQRALAELEGGAGAVLTNTGMSAIHLVTTVFLKPGDLLVAPHDCYGGSYRLFDSLAKRGCYRVLFVDQGDEQALRAALAEKPKLVLVESPSNPLLRVVDIAKICHLAREVGAVSVVDNTFLSPALQNPLALGADLVLHSCTKYLNGHSDVVAGVVIAKDPDVVTELAWWANNIGVTGGAFDSYLLLRGLRTLVPRMELAQRNAQAIVKYLQTQPLVKKLYHPSLPENQGHEIAARQQKGFGAMLSFELDGDEQTLRRFLGGLSLFTLAESLGGVESLISHAATMTHAGMAPEARAAAGISETLLRISTGIEDGEDLIADLENGFRAANKG

SEQ ID NO: 512 - protein, 303 aa, Escherichia coli
MSTLEQTIGNTPLVKLQRMGPDNGSEVWLKLEGNNPAGSVKDRAALSMIVEAEKRGEIKPGDVLIEATSGNTGIALAMIAALKGYRMKLLMPDNMSQERRAAMRAYGAELILVTKEQGMEGARDLALEMANRGEGKLLDQFNNPDNPYAHYTTTGPEIWQQTGGRITHFVSSMGTTGTITGVSRFMREQSKPVTIVGLQPEEGSSIPGIRRWPTEYLPGIFNASLVDEVLDIHQRDAENTMRELAVREGIFCGVSSGGAVAGALRVAKANPDAVVVAIICDRGDRYLSTGVFGEEHFSQGAGI

SEQ ID NO: 513 - protein, 323 aa, Escherichia coli
MSKIFEDNSLTIGHTPLVRLNRIGNGRILAKVESRNPSFSVKCRIGANMIWDAEKRGVLKPGVELVEPTSGNTGIALAYVAAARGYKLTLTMPETMSIERRKLLKALGANLVLTEGAKGMKGAIQKAEEIVASNPEKYLLLQQFSNPANPEIHEKTTGPEIWEDTDGQVDVFIAGVGTGGTLTGVSRYIKGTKGKTDLISVAVEPTDSPVIAQALAGEEIKPGPHKIQGIGAGFIPANLDLKLVDKVIGITNEEAISTARRLMEEEGILAGISSGAAVAAALKLQEDESFTNKNIVVILPSSGERYLSTALFADLFTEKELQQ

SEQ ID NO: 514 - protein, 390 aa, Escherichia coli
MFDFSKVVDRHGTWCTQWDYVADRFGTADLLPFTISDMDFATAPCIIEALNQRLMHGVFGYSRWKNDEFLAAIAHWFSTQHYTAIDSQTVVYGPSVIYMVSELIRQWSETGEGVVIHTPAYDAFYKAIEGNQRTVMPVALEKQADGWFCDMGKLEAVLAKPECKIMLLCSPQNPTGKVWTCDELEIMADLCERHGVRVISDEIHMDMVWGEQPHIPWSNVARGDWALLTSGSKSFNIPALTGAYGIIENSSSRDAYLSALKGRDGLSSPSVLALTAHIAAYQQGAPWLDALRIYLKDNLTYIADKMNAAFPELNWQIPQSTYLAWLDLRPLNIDDNALQKALIEQEKVAIMPGYTYGEEGRGFVRLNAGCPRSKLEKGVAGLINAIRAVR

SEQ ID NO: 515 - protein, 395 aa, Escherichia coli
MADKKLDTQLVNAGRSKKYTLGAVNSVIQRASSLVFDSVEAKKHATRNRANGELFYGRRGTLTHFSLQQAMCELEGGAGCVLFPCGAAAVANSILAFIEQGDHVLMTNTAYEPSQDFCSKILSKLGVTTSWFDPLIGADIVKHLQPNTKIVFLESPGSITMEVHDVPAIVAAVRSVVPDAIIMIDNTWAAGVLFKALDFGIDVSIQAATKYLVGHSDAMIGTAVCNARCWEQLRENAYLMGQMVDADTAYITSRGLRTLGVRLRQHHESSLKVAEWLAEHPQVARVNHPALPGSKGHEFWKRDFTGSSGLFSFVLKKKLNNEELANYLDNFSLFSMAYSWGGYESLILANQPEHIAAIRPQGEIDFSGTLIRLHIGLEDVDDLIADLDAGFARIV

SEQ ID NO: 516 - protein, 753 aa, Escherichia coli
MTILNHTLGFPRVGLRRELKKAQESYWAGNSTREELLAVGRELRARHWDQQKQAGIDLLPVGDFAWYDHVLTTSLLLGNVPARHQNKDGSVDIDTLFRIGRGRAPTGEPAAAAEMTKWFNTNYHYMVPEFVKGQQFKLTWTQLLDEVDEALALGHKVKPVLLGPVTWLWLGKVKGEQFDRLSLLNDILPVYQQVLAELAKRGIEWVQIDEPALVLELPQAWLDAYKPAYDALQGQVKLLLTTYFEGVTPNLDTITALPVQGLHVDLVHGKDDVAELHKRLPSDWLLSAGLINGRNVWRADLTEKYAQIKDIVGKRDLWVASSCSLLHSPIDLSVETRLDAEVKSWFAFALQKCHELALLRDALNSGDTAALAEWSAPIQARRHSTRVHNPAVEKRLAAITAQDSQRANVYEVRAEAQRARFKLPAWPTTTIGSFPQTTEIRTLRLDFKKGNLDANNYRTGIAEHIKQAIVEQERLGLDVLVHGEAERNDMVEYFGEHLDGFVFTQNGWVQSYGSRCVKPPIVIGDISRPAPITVEWAKYAQSLTDKPVKGMLTGPVTILCWSFPREDVSRETIAKQIALALRDEVADLEAAGIGIIQIDEPALREGLPLRRSDWDAYLQWGVEAFRINAAVAKDDTQIHTHMCYCEFNDIMDSIAALDADVITIETSRSDMELLESFEEFDYPNEIGPGVYDIHSPNVPSVEWIEALLKKAAKRIPAERLWVNPDCGLKTRGWPETRAALANMVQAAQNLRRG

SEQ ID NO: 517 - protein, 1227 aa, Escherichia coli
MSSKVEQLRAQLNERILVLDGGMGTMIQSYRLNEADFRGERFADWPCDLKGNNDLLVLSKPEVIAAIHNAYFEAGADIIETNTFNSTTIAMADYQMESLSAEINFAAAKLARACADEWTARTPEKPRYVAGVLGPTNRTASISPDVNDPAFRNITFDGLVAAYRESTKALVEGGADLILIETVFDTLNAKAAVFAVKTEFEALGVELPIMISGTITDASGRTLSGQTTEAFYNSLRHAEALTFGLNCALGPDELRQYVQELSRIAECYVTAHPNAGLPNAFGEYDLDADTMAKQIREWAQAGFLNIVGGCCGTTPQHIAAMSRAVEGLAPRKLPEIPVACRLSGLEPLNIGEDSLFVNVGERTNVTGSAKFKRLIKEEKYSEALDVARQQVENGAQIIDINMDEGMLDAEAAMVRFLNLIAGEPDIARVPIMIDSSKWDVIEKGLKCIQGKGIVNSISMKEGVDAFIHHAKLLRRYGAAVVVMAFDEQGQADTRARKIEICRRAYKILTEEVGFPPEDIIFDPNIFAVATGIEEHNNYAQDFIGACEDIKRELPHALISGGVSNVSFSFRGNDPVREAIHAVFLYYAIRNGMDMGIVNAGQLAIYDDLPAELRDAVEDVILNRRDDGTERLLELAEKYRGSKTDDTANAQQAEWRSWEVNKRLEYSLVKGITEFIEQDTEEARQQATRPIEVIEGPLMDGMNVVGDLFGEGKMFLPQVVKSARVMKQAVAYLEPFIEASKEQGKTNGKMVIATVKGDVHDIGKNIVGVVLQCNNYEIVDLGVMVPAEKILRTAKEVNADLIGLSGLITPSLDEMVNVAKEMERQGFTIPLLIGGATTSKAHTAVKIEQNYSGPTVYVQNASRTVGVVAALLSDTQRDDFVARTRKEYETVRIQHGRKKPRTPPVTLEAARDNDFAFDWQAYTPPVAHRLGVQEVEASIETLRNYIDWTPFFMTWSLAGKYPRILEDEVVGVEAQRLFKDANDMLDKLSAEKTLNPRGVVGLFPANRVGDDIEIYRDETRTHVINVSHHLRQQTEKTGFANYCLADFVAPKLSGKADYIGAFAVTGGLEEDALADAFEAQHDDYNKIMVKALADRLAEAFAEYLHERVRKVYWGYAPNENLSNEELIRENYQGIRPAPGYPACPEHTEKATIWELLEVEKHTGMKLTESFAMWPGASVSGWYFSHPDSKYYAVAQIQRDQVEDYARRKGMSVTEVERWLAPNLGYDAD

SEQ ID NO: 518 - protein, 384 aa, Escherichia coli
MAKHLFTSESVSEGHPDKIADQISDAVLDAILEQDPKARVACETYVKTGMVLVGGEITTSAWVDIEEITRNTVREIGYVHSDMGFDANSCAVLSAIGKQSPDINQGVDRADPLEQGAGDQGLMFGYATNETDVLMPAPITYAHRLVQRQAEVRKNGTLPWLRPDAKSQVTFQYDDGKIVGIDAVVLSTQHSEEIDQKSLQEAVMEEIIKPILPAEWLTSATKFFINPTGRFVIGGPMGDCGLTGRKIIVDTYGGMARHGGGAFSGKDPSKVDRSAAYAARYVAKNIVAAGLADRCEIQVSYAIGVAEPTSIMVETFGTEKVPSEQLTLLVREFFDLRPYGLIQMLDLLHPIYKETAAYGHFGREHFPWEKTDKAQLLRDAAGLK

SEQ ID NO: 519 - protein, 310 aa, Escherichia coli
MVKVYAPASSANMSVGFDVLGAAVTPVDGALLGDVVTVEAAETFSLNNLGRFADKLPSEPRENIVYQCWERFCQELGKQIPVAMTLEKNMPIGSGLGSSACSVVAALMAMNEHCGKPLNDTRLLALMGELEGRISGSIHYDNVAPCFLGGMQLMIEENDIISQQVPGFDEWLWVLAYPGIKVSTAEARAILPAQYRRQDCIAHGRHLAGFIHACYSRQPELAAKLMKDVIAEPYRERLLPGFRQARQAVAEIGAVASGISGSGPTLFALCDKPETAQRVADWLGKNYLQNQEGFVHICRLDTAGARVLEN

SEQ ID NO: 520 - protein, 428 aa, Escherichia coli
MKLYNLKDHNEQVSFAQAVTQGLGKNQGLFFPHDLPEFSLTEIDEMLKLDFVTRSAKILSAFIGDEIPQEILEERVRAAFAFPAPVANVESDVGCLELFHGPTLAFKDFGGRFMAQMLTHIAGDKPVTILTATSGDTGAAVAHAFYGLPNVKVVILYPRGKISPLQEKLFCTLGGNIETVAIDGDFDACQALVKQAFDDEELKVALGLNSANSINISRLLAQICYYFEAVAQLPQETRNQLVVSVPSGNFGDLTAGLLAKSLGLPVKRFIAATNVNDTVPRFLHDGQWSPKATQATLSNAMDVSQPNNWPRVEELFRRKIWQLKELGYAAVDDETTQQTMRELKELGYTSEPHAAVAYRALRDQLNPGEYGLFLGTAHPAKFKESVEAILGETLDLPKELAERADLPLLSHNLPADFAALRKLMMNHQ

SEQ ID NO: 521 - protein, 514 aa, Escherichia coli [sequence omitted]

SEQ ID NO: 522 - protein, 410 aa, Escherichia coli
MAKVSLEKDKIKFLLVEGVHQKALESLRAAGYTNIEFHKGALDDEQLKESIRDAHFIGLRSRTHLTEDVINAAEKLVAIGCFCIGTNQVDLDAAAKRGIPVFNAPFSNTRSVAELVIGELLLLLRGVPEANAKAHRGVWNKLAAGSFEARGKKLGIIGYGHIGTQLGILAESLGMYVYFYDIENKLPLGNATQVQHLSDLLNMSDVVSLHVPENPSTKNMMGAKEISLMKPGSLLINASRGTVVDIPALCDALASKHLAGAAIDVFPTEPATNSDPFTSPLCEFDNVLLTPHIGGSTQEAQENIGLEVAGKLIKYSDNGSTLSAVNFPEVSLPLHGGRRLMHIHENRPGVLTALNKIFAEQGVNIAAQYLQTSAQMGYVVIDIEADEDVAEKALQAMKAIPGTIRARLLY

SEQ ID NO: 523 - protein, 362 aa, Escherichia coli
MAQIFNFSSGPAMLPAEVLKQAQQELRDWNGLGTSVMEVSHRGKEFIQVAEEAEKDFRDLLNVPSNYKVLFCHGGGRGQFAAVPLNILGDKTTADYVDAGYWAASAIKEAKKYCTPNVFDAKVTVDGLRAVKPMREWQLSDNAAYMHYCPNETIDGIAIDETPDFGADVVVAADFSSTILSRPIDVSRYGVIYAGAQKNIGPAGLTIVIVREDLLGKANIACPSILDYSILNDNGSMFNTPPTFAWYLSGLVFKWLKANGGVAEMDKINQQKAELLYGVIDNSDFYRNDVAKANRSRMNVPFQLADSALDKLFLEESFAAGLHALKGHRVVGGMRASIYNAMPLEGVKALTDFMVEFERRHG

SEQ ID NO: 524 - protein, 322 aa, Escherichia coli [sequence omitted]

SEQ ID NO: 525 - protein, 273 aa, Escherichia coli
MSCEELEIVWNNIKAEARTLADCEPMLASFYHATLLKHENLGSALSYMLANKLSSPIMPAIAIREVVEEAYAADPEMIASAACDIQAVRTRDPAVDKYSTPLLYLKGFHALQAYRIGHWLWNQGRRALAIFLQNQVSVTFQVDIHPAAKIGRGIMLDHATGIVVGETAVIENDVSILQSVTLGGTGKSGGDRHPKIREGVMIGAGAKILGNIEVGRGAKIGAGSVVLQPVPPHTTAAGVPARIVGKPDSDKPSMDMDQHFNGINHTFEYGDGI

SEQ ID NO: 526 - protein, 417 aa, Escherichia coli
MLKREMNIADYDAELWQAMEQEKVRQEEHIELIASENYTSPRVMQAQGSQLTNKYAEGYPGKRYYGGCEYVDIVEQLAIDRAKELFGADYANVQPHSGSQANFAVYTALLEPGDTVLGMNLAHGGHLTHGSPVNFSGKLYNIVPYGIDATGHIDYADLEKQAKEHKPKMIIGGFSAYSGVVDWAKMREIADSIGAYLFVDMAHVAGLVAAGVYPNPVPHAHVVTTTTHKTLAGPRGGLILAKGGSEELYKKLNSAVFPGGQGGPLMHVIAGKAVALKEAMEPEFKTYQQQVAKNAKAMVEVFLERGYKVVSGGTDNHLFLVDLVDKNLTGKEADAALGRANITVNKNSVPNDPKSPFVTSGIRVGTPAITRRGFKEAEAKELAGWMCDVLDSINDEAVIERIKGKVLDICARYPVYA

SEQ ID NO: 527 - protein, 398 aa, Escherichia coli
MRGEFYQQLTNDLETARAEGLFKEERIITSAQQADITVADGSHVINFCANNYLGLANHPDLIAAAKAGMDSHGFGMASVRFICGTQDSHKELEQKLAAFLGMEDAILYSSCFDANGGLFETLLGAEDAIISDALNHASIIDGVRLCKAKRYRYANNDMQELEARLKEAREAGARHVLIATDGVFSMDGVIANLKGVCDLADKYDALVMVDDSHAVGFVGENGRGSHEYCDVMGRVDIITGTLGKALGGASGGYTAARKEVVEWLRQRSRPYLFSNSLAPAIVAASIKVLEMVEAGSELRDRLWANARQFREQMSAAGFTLAGADHAIIPVMLGDAVVAQKFARELQKEGIYVTGFFYPVVPKGQARIRTQMSAAHTPEQITRAVEAFTRIGKQLGVIA

SEQ ID NO: 528 - protein, 341 aa, Escherichia coli
MKALSKLKAEEGIWMTDVPVPELGHNDLLIKIRKTAICGTDVHIYNWDEWSQKTIPVPMVVGHEYVGEVVGIGQEVKGFKIGDRVSGEGHITCGHCRNCRGGRTHLCRNTIGVGVNRPGCFAEYLVIPAFNAFKIPDNISDDLAAIFDPFGNAVHTALSFDLVGEDVLVSGAGPIGIMAAAVAKHVGARNVVITDVNEYRLELARKMGITRAVNVAKENLNDVMAELGMTEGFDVGLEMSGAPPAFRTMLDTMNHGGRIAMLGIPPSDMSIDWTKVIFKGLFIKGIYGREMFETWYKMAALIQSGLDLSPIITHRFSIDDFQKGFDAMRSGQSGKVILSWD

SEQ ID NO: 529 - protein, 87 aa, Escherichia coli
MMQHQVNVSARFNPETLERVLRVVRHRGFHVCSMNMAAASDAQNINIELTVASPRSVDLLFSQLNKLVDVAHVAICQSTTTSQQIRA

SEQ ID NO: 530 - protein, 193 aa, Escherichia coli
MLLKQLSDRKPADCVVTTDVGQHQMWAAQHIAHTRPENFITSSGLGTMGFGLPAAVGAQVARPNDTVVCISGDGSFMMNVQELGTVKRKQLPLKIVLLDNQRLGMVRQWQQLFFQERYSETTLTDNPDFLMLASAFGIHGQHITRKDQVEAALDTMLNSDGPYLLHVSIDELENVWPLVPPGASNSEMLEKLS

SEQ ID NO: 531 - protein, 327 aa, Escherichia coli
MNGAQWVVHALRAQGVNTVFGYPGGAIMPVYDALYDGGVEHLLCRHEQGAAMAAIGYARATGKTGVCIATSGPGATNLITGLADALLDSIPVVAITGQVSAPFIGTDAFQEVDVLGLSLACTKHSFLVQSLEELPRIMAEAFDVACSGRPGPVLVDIPKDIQLASGDLEPWFTTVENEVTFPHAEVEQARQMLAKAQKPMLYVGGGVGMAQAVPALREFLAATKMPATCTLKGLGAVEADYPYYLGMLGMHGTKAANFAVQECDLLIAVGARFDDRVTGKLNTFAPHASVIHMDIDPAEMNKLRQAHVALQGDLNALLPALQQPLNQ

SEQ ID NO: 532 - protein, 96 aa, Escherichia coli
MQNTTHDNVILELTVRNHPGVMTHVCGLFARRAFNVEGILCLPIQDSDKSHIWLLVNDDQRLEQMISQIDKLEDVVKVQRNQSDPTMFNKIAVFFQ

SEQ ID NO: 533 - protein, 562 aa, Escherichia coli
MASSGTTSTRKRFTGAEFIVHFLEQQGIKIVTGIPGGSILPVYDALSQSTQIRHILARHEQGAGFIAQGMARTDGKPAVCMACSGPGATNLVTAIADARLDSIPLICITGQVPASMIGTDAFQEVDTYGISIPITKHNYLVRHIEELPQVMSDAFRIAQSGRPGPVWIDIPKDVQTAVFEIETQPAMAEKAAAPAFSEESIRDAAAMINAAKRPVLYLGGGVINAPARVRELAEKAQLPTTMTLMALGMLPKAHPLSLGMLGMHGVRSTNYILQEADLLIVLGARFDDRAIGKTEQFCPNAKIIHVDIDRAELGKIKQPHVAIQADVDDVLAQLIPLVEAQPRAEWHQLVADLQREFPCPIPKACDPLSHYGLINAVAACVDDNAIITTDVGQHQMWTAQAYPLNRPRQWLTSGGLGTMGFGLPAAIGAALANPDRKVLCFSGDGSLMMNIQEMATASENQLDVKIILMNNEALGLVHQQQSLFYEQGVFAATYPGKINFMQIAAGFGLETCDLNNEADPQASLQEIINRPGPALIHVRIDAEEKVYPMVPPGAANTEMVGE

SEQ ID NO: 534 - protein, 163 aa, Escherichia coli
MRRILSVLLENESGALSRVIGLFSQRGYNIESLTVAPTDDPTLSRMTIQTVGDEKVLEQIEKQLHKLVDVLRVSELGQGAHVEREIMLVKIQASGYGRDEVKRNTEIFRGQIIDVTPSLYTVQLAGTSGKLDAFLASIRDVAKIVEVARSGVVGLSRGDKIMR

SEQ ID NO: 535 - protein, 32 aa, Escherichia coli
MTALLRVISLVVISVVVIIIPPCGAALGRGKA

SEQ ID NO: 536 - protein, 491 aa, Escherichia coli
MANYFNTLNLRQQLAQLGKCRFMGRDEFADGASYLQGKKVVIVGCGAQGLNQGLNMRDSGLDISYALRKEAIAEKRASWRKATENGFKVGTYEELIPQADLVINLTPDKQHSDVVRTVQPLMKDGAALGYSHGFNIVEVGEQIRKDITVVMVAPKCPGTEVREEYKRGFGVPTLIAVHPENDPKGEGMAIAKAWAAATGGHRAGVLESSFVAEVKSDLMGEQTILCGMLQAGSLLCFDKLVEEGTDPAYAEKLIQFGWETITEALKQGGITLMMDRLSNPAKLRAYALSEQLKEIMAPLFQKHMDDIISGEFSSGMMADWANDDKKLLTWREETGKTAFETAPQYEGKIGEQEYFDKGVLMIAMVKAGVELAFETMVDSGIIEESAYYESLHELPLIANTIARKRLYEMNVVISDTAEYGNYLFSYACVPLLKPFMAELQPGDLGKAIPEGAVDNGQLRDVNEAIRSHAIEQVGKKLRGYMTDMKRIAVAG

SEQ ID NO: 537 - protein, 616 aa, Escherichia coli
MPKYRSATTTHGRNMAGARALWRATGMTDADFGKPIIAVVNSFTQFVPGHVHLRDLGKLVAEQIEAAGGVAKEFNTIAVDDGIAMGHGGMLYSLPSRELIADSVEYMVNAHCADAMVCISNCDKITPGMLMASLRLNIPVIFVSGGPMEAGKTKLSDQIIKLDLVDAMIQGADPKVSDSQSDQVERSACPTCGSCSGMFTANSMNCLTEALGLSQPGNGSLLATHADRKQLFLNAGKRIVELTKRYYEQNDESALPRNIASKAAFENAMTLDIAMGGSTNTVLHLLAAAQEAEIDFTMSDIDKLSRKVPQLCKVAPSTQKYHMEDVHRAGGVIGILGELDRAGLLNRDVKNVLGLTLPQTLEQYDVMLTQDDAVKNMFRAGPAGIRTTQAFSQDCRWDTLDDDRANGCIRSLEHAYSKDGGLAVLYGNFAENGCIVKTAGVDDSILKFTGPAKVYESQDDAVEAILGGKVVAGDVVVIRYEGPKGGPGMQEMLYPTSFLKSMGLGKACALITDGRFSGGTSGLSIGHVSPEAASGGSIGLIEDGDLIAIDIPNRGIQLQVSDAELAARREAQDARGDKAWTPKNRERQVSFALRAYASLATSADKGAVRDKSKLGG

SEQ ID NO: 538 - protein, 309 aa, Escherichia coli
MTTKKADYIWFNGEMVRWEDAKVHVMSHALHYGTSVFEGIRCYDSHKGPVVFRHREHMQRLHDSAKIYRFPVSQSIDELMEACRDVIRKNNLTSAYIRPLIFVGDVGMGVNPPAGYSTDVIIAAFPWGAYLGAEALEQGIDAMVSSWNRAAPNTIPTAAKAGGNYLSSLLVGSEARRHGYQEGIALDVNGYISEGAGENLFEVKDGVLFTPPFTSSALPGITRDAIIKLAKELGIEVREQVLSRESLYLADEVFMSGTAAEITPVRSVDGIQVGEGRCGPVTKRIQQAFFGLFTGETEDKWGWLDQVNQ

SEQ ID NO: 539 - protein, 447 aa, Escherichia coli
MDQTYSLESFLNHVQKRDPNQTEFAQAVREVMTTLWPFLEQNPKYRQMSLLERLVEPERVIQFRVVWVDDRNQIQVNRAWRVQFSSAIGPYKGGMRFHPSVNLSILKFLGFEQTFKNALTTLPMGGGKGGSDFDPKGKSEGEVMRFCQALMTELYRHLGADTDVPAGDIGVGGREVGFMAGMMKKLSNNTACVFTGKGLSFGGSLIRPEATGYGLVYFTEAMLKRHGMGFEGMRVSVSGSGNVAQYAIEKAMEFGARVITASDSSGTVVDESGFTKEKLARLIEIKASRDGRVADYAKEFGLVYLEGQQPWSLPVDIALPCATQNELDVDAAHQLIANGVKAVAEGANMPTTIEATELFQQAGVLFAPGKAANAGGVATSGLEMAQNAARLGWKAEKVDARLHHIMLDIHHACVEHGGEGEQTNYVQGANIAGFVKVADAMLAQGVI

SEQ ID NO: 540 - protein, 469 aa, Escherichia coli
MSAEHVLTMLNEHEVKFVDLRFTDTKGKEQHVTIPAHQVNAEFFEEGKMFDGSSIGGWKGINESDMVLMPDASTAVIDPFFADSTLIIRCDILEPGTLQGYDRDPRSIAKRAEDYLRSTGIADTVLFGPEPEFFLFDDIRFGSSISGSHVAIDDIEGAWNSSTQYEGGNKGHRPAVKGGYFPVPPVDSAQDIRSEMCLVMEQMGLVVEAHHHEVATAGQNEVATRFNTMTKKADEIQIYKYVVHNVAHRFGKTATFMPKPMFGDNGSGMHCHMSLSKNGVNLFAGDKYAGLSEQALYYIGGVIKHAKAINALANPTTNSYKRLVPGYEAPVMLAYSARNRSASIRIPVVSSPKARRIEVRFPDPAANPYLCFAALLMAGLDGIKNKIHPGEAMDKNLYDLPPEEAKEIPQVAGSLEEALNELDLDREFLKAGGVFTDEAIDAYIALRREEDDRVRMTPHPVEFELYYSV

SEQ ID NO: 541 - protein, 382 aa, Escherichia coli
MIKSALLVLEDGTQFHGRAIGATGSAVGEVVFNTSMTGYQEILTDPSYSRQIVTLTYPHIGNVGTNDADEESSQVHAQGLVIRDLPLIASNFRNTEDLSSYLKRHNIVAIADIDTRKLTRLLREKGAQNGCIIAGDNPDAALALEKARAFPGLNGMDLAKEVTTAEAYSWTQGSWTLTGGLPEAKKEDELPFHVVAYDFGAKRNILRMLVDRGCRLTIVPAQTSAEDVLKMNPDGIFLSNGPGDPAPCDYAITAIQKFLETDIPVFGICLGHQLLALASGAKTVKMKFGHHGGNHPVKDVEKNVVMITAQNHGFAVDEATLPANLRVTHKSLFDGTLQGIHRTDKPAFSFQGHPEASPGPHDAAPLFDHFIELIEQYRKTAK

SEQ ID NO: 542 - protein, 1073 aa, Escherichia coli [sequence omitted]

SEQ ID NO: 543 - protein, 156 aa, Escherichia coli
MIQSQINRNIRLDLADAILLSKAKKDLSFAEIADGTGLAEAFVTAALLGQQALPADAARLVGAKLDLDEDSILLLQMIPLRGCIDDRIPTDPTMYRFYEMLQVYGTTLKALVHEKFGDGIISAINFKLDVKKVADPEGGERAVITLDGKYLPTKPF

SEQ ID NO: 544 - protein, 219 aa, Escherichia coli
MKEIIDGFLKFQREAFPKREALFKQLATQQSPRTLFISCSDSRLVPELVTQREPGDLFVIRNAGNIVPSYGPEPGGVSASVEYAVAALRVSDIVICGHSNCGAMTAIASCQCMDHMPAVSHWLRYADSARVVNEARPHSDLPSKAAAMVRENVIAQLANLQTHPSVRLALEEGRIALHGWVYDIESGSIAAFDGATRQFVPLAANPRVCAIPLRQPTAA

SEQ ID NO: 545 - protein, 443 aa, Escherichia coli
MVKERKTELVEGFRHSVPYINTHRGKTFVIMLGGEAIEHENFSSIVNDIGLLHSLGIRLVVVYGARPQIDANLAAHHHEPLYHKNIRVTDAKTLELVKQAAGTLQLDITARLSMSLNNTPLQGAHINVVSGNFIIAQPLGVDDGVDYCHSGRIRRIDEDAIHRQLDSGAIVLMGPVAVSVTGESFNLTSEEIATQLAIKLKAEKMIGFCSSQGVTNDDGDIVSELFPNEAQARVEAQEEKGDYNSGTVRFLRGAVKACRSGVRRCHLISYQEDGALLQELFSRDGIGTQIVMESAEQIRRATINDIGGILELIRPLEQQGILVRRSREQLEMEIDKFTIIQRDNTTIACAALYPFPEEKIGEMACVAVHPDYRSSSRGEVLLERIAAQAKQSGLSKLFVLTTRSIHWFQERGFTPVDIDLLPESKKQLYNYQRKSKVLMADLG

SEQ ID NO: 546 - protein, 258 aa, Escherichia coli
MMNPLIIKLGGVLLDSEEALERLFSALVNYRESHQRPLVIVHGGGCVVDELMKGLNLPVKKKNGLRVTPADQIDIITGALAGTANKTLLAWAKKHQIAAVGLFLGDGDSVKVTQLDEELGHVGLAQPGSPKLINSLLENGYLPVVSSIGVTDEGQLMNVNADQAATALAATLGADLILLSDVSGILDGKGQRIAEMTAAKAEQLIEQGIITDGMIVKVNAALDAARTLGRPVDIASWRHAEQLPALFNGMPMGTRILA

SEQ ID NO: 547 - protein, 334 aa, Escherichia coli
MLNTLIVGASGYAGAELVTYVNRHPHMNITALTVSAQSNDAGKLISDLHPQLKGIVDLPLQPMSDISEFSPGVDVVFLATAHEVSHDLAPQFLEAGCVVFDLSGAFRVNDATFYEKYYGFTHQYPELLEQAAYGLAEWCGNKLKEANLIAVPGCYPTAAQLALKPLIDADLLDLNQWPVINATSGVSGAGRKAAISNSFCEVSLQPYGVFTHRHQPEIATHLGADVIFTPHLGNFPRGILETITCRLKSGVTQAQVAQVLQQAYAHKPLVRLYDKGVPALKNVVGLPFCDIGFAVQGEHLIIVATEDNLLKGAAAQAVQCANIRFGYAETQSLI

SEQ ID NO: 548 - protein, 406 aa, Escherichia coli
MSQPITRENFDEWMIPVYAPAPFIPVRGEGSRLWDQQGKEYIDFAGGIAVNALGHAHPELREALNEQASKFWHTGNGYTNEPVLRLAKKLIDATFADRVFFCNSGAEANEAALKLARKFAHDRYGSHKSGIVAFKNAFHGRTLFTVSAGGQPAYSQDFAPLPADIRHAAYNDINSASALIDDSTCAVIVEPIQGEGGVVPASNAFLQGLRELCNRHNALLIFDEVQTGVGRTGELYAYMHYGVTPDLLTTAKALGGGFPVGALLATEECARVMTVGTHGTTYGGNPLASAVAGKVLELINTPEMLNGVKQRHDWFVERLNTINHRYGLFSEVRGLGLLIGCVLNADYAGQAKQISQEAAKAGVMVLIAGGNVVRFAPALNVSEEEVTTGLDRFAAACEHFVSRGSS

SEQ ID NO: 549 - protein, 406 aa, Escherichia coli
MAIEQTAITRATFDEVILPIYAPAEFIPVKGQGSRIWDQQGKEYVDFAGGIAVTALGHCHPALVNALKTQGETLWHISNVFTNEPALRLGRKLIEATFAERVVFMNSGTEANETAFKLARHYACVRHSPFKTKIIAFHNAFHGRSLFTVSVGGQPKYSDGFGPKPADIIHVPFNDLHAVKAVMDDHTCAVVVEPIQGEGGVTAATPEFLQGLRELCDQHQALLVFDEVQCGMGRTGDLFAYMHYGVTPDILTSAKALGGGFPISAMLTTAEIASAFHPGSHGSTYGGNPLACAVAGAAFDIINTPEVLEGIQAKRQRFVDHLQKIDQQYDVFSDIRGMGLLIGAELKPQYKGRARDFLYAGAEAGVMVLNAGPDVMRFAPSLVVEDADIDEGMQRFAHAVAKVVGA

SEQ ID NO: 550 - protein, 383 aa, Escherichia coli
MKNKLPPFIEIYRALIATPSISATEEALDQSNADLITLLADWFKDLGFNVEVQPVPGTRNKFNMLASIGQGAGGLLLAGHTDTVPFDDGRWTRDPFTLTEHDGKLYGLGTADMKGFFAFILDALRDVDVTKLKKPLYILATADEETSMAGARYFAETTALRPDCAIIGEPTSLQPVRAHKGHISNAIRIQGQSGHSSDPARGVNAIELMHDAIGHILQLRDNLKERYHYEAFTVPYPTLNLGHIHGGDASNRICACCELHMDIRPLPGMTLNELNGLLNDALAPVSERWPGRLTVDELHPPIPGYECPPNHQLVEVVEKLLGAKTEVVNYCTEAPFIQTLCPTLVLGPGSINQAHQPDEYLETRFIKPTRELITQVIHHFCWH

SEQ ID NO: 551 - protein, 334 aa, Escherichia coli
MSDLYKKHFLKLLDFTPAQFTSLLTLAAQLKADKKNGKEVQKLTGKNIALIFEKDSTRTRCSFEVAAFDQGARVTYLGPSGSQIGHKESIKDTARVLGRMYDGIQYRGHGQEVVETLAQYAGVPVWNGLTNEFHPTQLLADLMTMQEHLPGKAFNEMTLVYAGDARNNMGNSMLEAAALTGLDLRLLAPKACWPEESLVAECSALAEKHGGKITLTEDVAAGVKGADFIYTDVWVSMGEAKEKWAERIALLRGYQVNAQMMALTDNPNVKFLHCLPAFHDDQTTLGKQMAKEFDLHGGMEVTDEVFESAASIVFDQAENRMHTIKAVMMATLGE

SEQ ID NO: 552 - protein, 334 aa, Escherichia coli
MSGFYHKHFLKLLDFTPAELNSLLQLAAKLKADKKSGKEEAKLTGKNIALIFEKDSTRTRCSFEVAAYDQGARVTYLGPSGSQIGHKESIKDTARVLGRMYDGIQYRGYGQEIVETLAEYASVPVWNGLTNEFHPTQLLADLLTMQEHLPGKAFNEMTLVYAGDARNNMGNSMLEAAALTGLDLRLVAPQACWPEAALVTECRALAQQNGGNITLTEDVAKGVEGADFIYTDVWVSMGEAKEKWAERIALLREYQVNSKMMQLTGNPEVKFLHCLPAFHDDQTTLGKKMAEEFGLHGGMEVTDEVFESAASIVFDQAENRMHTIKAVMVATLSK

SEQ ID NO: 553 - protein, 447 aa, Escherichia coli
MTTILKHLPVGQRIGIAFSGGLDTSAALLWMRQKGAVPYAYTANLGQPDEEDYDAIPRRAMEYGAENARLIDCRKQLVAEGIAAIQCGAFHNTTGGLTYFNTTPLGRAVTGTMLVAAMKEDGVNIWGDGSTYKGNDIERFYRYGLLTNAELQIYKPWLDTDFIDELGGRHEMSEFMIACGFDYKMSVEKAYSTDSNMLGATHEAKDLEYLNSSVKIVNPIMGVKFWDESVKIPAEEVTVRFEQGHPVALNGKTFSDDVEMMLEANRIGGRHGLGMSDQIENRIIEAKSRGIYEAPGMALLHIAYERLLTGIHNEDTIEQYHAHGRQLGRLLYQGRWFDSQALMLRDSLQRWVASQITGEVTLELRRGNDYSILNTVSENLTYKPERLTMEKGDSVFSPDDRIGQLTMRNLDITDTREKLFGYAKTGLLSSSAASGVPQVENLENKGQ

SEQ ID NO: 554 - protein, 457 aa, Escherichia coli
MALWGGRFTQAADQRFKQFNDSLRFDYRLAEQDIVGSVAWSKALVTVGVLTAEEQAQLEEALNVLLEDVRARPQQILESDAEDIHSWVEGKLIDKVGQLGKKLHTGRSRNDQVATDLKLWCKDTVSELLTANRQLQSALVETAQNNQDAVMPGYTHLQRAQPVTFAHWCLAYVEMLARDESRLQDALKRLDVSPLGCGALAGTAYEIDREQLAGWLGFASATRNSLDSVSDRDHVLELLSAAAIGMVHLSRFAEDLIFFNTGEAGFVELSDRVTSGSSLMPQKKNPDALELIRGKCGRVQGALTGMMMTLKGLPLAYNKDMQEDKEGLFDALDTWLDCLHMAALVLDGIQVKRPRCQEAAQQGYANATELADYLVAKGVPFREAHHIVGEAVVEAIRQGKPLEDLPLSELQKFSQVIDEDVYPILSLQSCLDKRAAKGGVSPQQVAQAIAFAQARLG

SEQ ID NO: 555 - protein, 658 aa, Escherichia coli
MSDDMSMGLPSSAGEHGVLRSMQEVAMSSQEASKMLRTYNIAWWGNNYYDVNELGHISVCPDPDVPEARVDLAQLVKTREAQGQRLPALFCFPQILQHRLRSINAAFKRARESYGYNGDYFLVYPIKVNQHRRVIESLIHSGEPLGLEAGSKAELMAVLAHAGMTRSVIVCNGYKDREYIRLALIGEKMGHKVYLVIEKMSEIAIVLDEAERLNVVPRLGVRARLASQGSGKWQSSGGEKSKFGLAATQVLQLVETLREAGRLDSLQLLHFHLGSQMANIRDIATGVRESARFYVELHKLGVNIQCFDVGGGLGVDYEGTRSQSDCSVNYGLNEYANNIIWAIGDACEENGLPHPTVITESGRAVTAHHTVLVSNIIGVERNEYTVPTAPAEDAPRALQSMWETWQEMHEPGTRRSLREWLHDSQMDLHDIHIGYSSGIFSLQERAWAEQLYLSMCHEVQKQLDPQNRAHRPIIDELQERMADKMYVNFSLFQSMPDAWGIDQLFPVLPLEGLDQVPERRAVLLDITCDSDGAIDHYIDGDGIATTMPMPEYDPENPPMLGFFMVGAYQEILGNMHNLFGDTEAVDVFVFPDGSVEVELSDEGDTVADMLQYVQLDPKTLLTQFRDQVKKTDLDAELQQQFLEEFEAGLYGYTYLEDE

SEQ ID NO: 556 - protein, 755 aa, Escherichia coli
MKVLIVESEFLHQDTWVGNAVERLADALSQQNVTVIKSTSFDDGFAILSSNEAIDCLMFSYQMEHPDEHQNVRQLIGKLHERQQNVPVFLLGDREKALAAMDRDLLELVDEFAWILEDTADFIAGRAVAAMTRYRQQLLPPLFSALMKYSDIHEYSWAAPGHQGGVGFTKTPAGRFYHDYYGENLFRTDMGIERTSLGSLLDHTGAFGESEKYAARVFGADRSWSVVVGTSGSNRTIMQACMTDNDVVVVDRNCHKSIEQGLMLTGAKPVYMVPSRNRYGIIGPIYPQEMQPETLQKKISESPLTKDKAGQKPSYCVVTNCTYDGVCYNAKEAQDLLEKTSDRLHFDEAWYGYARFNPIYADHYAMRGEPGDHNGPTVFATHSTHKLLNALSQASYIHVREGRGAINFSRFNQAYMMHATTSPLYAICASNDVAVSMMDGNSGLSLTQEVIDEAVDFRQAMARLYKEFTADGSWFFKPWNKEVVTDPQTGKTYDFADAPTKLLTTVQDCWVMHPGESWHGFKDIPDNWSMLDPIKVSILAPGMGEDGELEETGVPAALVTAWLGRHGIVPTRTTDFQIMFLFSMGVTRGKWGTLVNTLCSFKRHYDANTPLAQVMPELVEQYPDTYANMGIHDLGDTMFAWLKENNPGARLNEAYSGLPVAEVTPREAYNAIVDNNVELVSIENLPGRIAANSVIPYPPGIPMLLSGENFGDKNSPQVSYLRSLQSWDHHFPGFEHETEGTEIIDGIYHVMCVKA

SEQ ID NO: 557 - protein, 306 aa, Escherichia coli
MSTLGHQYDNSLVSNAFGFLRLPMNFQPYDSDADWVITGVPFDMATSGRAGGRHGPAAIRQVSTNLAWEHNRFPWNFDMRERLNVVDCGDLVYAFGDAREMSEKLQAHAEKLLAAGKRMLSFGGDHFVTLPLLRAHAKHFGKMALVHFDAHTDTYANGCEFDHGTMFYTAPKEGLIDPNHSVQIGIRTEFDKDNGFTVLDACQVNDRSVDDVIAQVKQIVGDMPVYLTFDIDCLDPAFAPGTGTPVIGGLTSDRAIKLVRGLKDLNIVGMDVVEVAPAYDQSEITALAAATLALEMLYIQAAKKGE

SEQ ID NO: 558 - protein, 459 aa, Escherichia coli
MNRLPSSASALACSAHALNLIEKRTLDHEEMKALNREVIEYFKEHVNPGFLEYRKSVTAGGDYGAVEWQAGSLNTLVDTQGQEFIDCLGGFGIFNVGHRNPVVVSAVQNQLAKQPLHSQELLDPLRAMLAKTLAALTPGKLKYSFFCNSGTESVEAALKLAKAYQSPRGKFTFIATSGAFHGKSLGALSATAKSTFRKPFMPLLPGFRHVPFGNIEAMRTALNECKKTGDDVAAVILEPIQGEGGVILPPPGYLTAVRKLCDEFGALMILDEVQTGMGRTGKMFACEHENVQPDILCLAKALGGGVMPIGATIATEEVFSVLFDNPFLHTTTFGGNPLACAAALATINVLLEQNLPAQAEQKGDMLLDGFRQLAREYPDLVQEARGKGMLMAIEFVDNEIGYNFASEMFRQRVLVAGTLNNAKTIRIEPPLTLTIEQCELVIKAARKALAAMRVSVEEA

SEQ ID NO: 559 - protein, 711 aa, Escherichia coli
MKSMNIAASSELVSRLSSHRRVVALGDTDFTDVAAVVITAADSRSGILALLKRTGFHLPVFLYSEHAVELPAGVTAVINGNEQQWLELESAACQYEENLLPPFYDTLTQYVEMGNSTFACPGHQHGAFFKKHPAGRHFYDFFGENVFRADMCNADVKLGDLLIHEGSAKDAQKFAAKVFHADKTYFVLNGTSAANKVVTNALLTRGDLVLFDRNNHKSNHHGALIQAGATPVYLEASRNPFGFIGGIDAHCFNEEYLRQQIRDVAPEKADLPRPYRLAIIQLGTYDGTVYNARQVIDTVGHLCDYILFDSAWVGYEQFIPMMADSSPLLLELNENDPGIFVTQSVHKQQAGFSQTSQIHKKDNHIRGQARFCPHKRLNNAFMLHASTSPFYPLFAALDVNAKIHEGESGRRLWAECVEIGIEARKAILARCKLFRPFIPPVVDGKLWQDYPTSVLASDRRFFSFEPGAKWHGFEGYAADQYFVDPCKLLLTTPGIDAETGEYSDFGVPATILAHYLRENGIVPEKCDLNSILFLLTPAESHEKLAQLVAMLAQFEQHIEDDSPLVEVLPSVYNKYPVRYRDYTLRQLCQEMHDLYVSFDVKDLQKAMFRQQSFPSVVMNPQDAHSAYIRGDVELVRIRDAEGRIAAEGALPYPPGVLCVVPGEVWGGAVQRYFLALEEGVNLLPGFSPELQGVYSETDADGVKRLYGYVLK

SEQ ID NO: 560 - protein, 732 aa, Escherichia coli
MSKLKIAVSDSCPDCFTTQRECIYINESRNIDVAAIVLSLNDVTCGKLDEIDATGYGIPVFIATENQERVPAEYLPRISGVFENCESRREFYGRQLETAASHYETQLRPPFFRALVDYVNQGNSAFDCPGHQGGEFFRRHPAGNQFVEYFGEALFRADLCNADVAMGDLLIHEGAPCIAQQHAAKVFNADKTYFVLNGTSSSNKVVLNALLTPGDLVLFDRNNHKSNHHGALLQAGATPVYLETARNPYGFIGGIDAHCFEESYLRELIAEVAPQRAKEARPFRLAVIQLGTYDGTIYNARQVVDKIGHLCDYILFDSAWVGYEQFIPMMADCSPLLLDLNENDPGILVTQSVHKQQAGFSQTSQIHKKDSHIKGQQRYVPHKRMNNAFMMHASTSPFYPLFAALNINAKMHEGVSGRNMWMDCVVNGINARKLILDNCQHIRPFVPELVDGKPWQSYETAQIAVDLRFFQFVPGEHWHSFEGYAENQYFVDPCKLLLTTPGIDARNGEYEAFGVPATILANFLRENGVVPEKCDLNSILFLLTPAEDMAKLQQLVALLVRFEKLLESDAPLAEVLPSIYKQHEERYAGYTLRQLCQEMHDLYARHNVKQLQKEMFRKEHFPRVSMNPQEANYAYLRGEVELVRLPDAEGRIAAEGALPYPPGVLCVVPGEIWGGAVLRYFSALEEGINLLPGFAPELQGVYIEEHDGRKQVWCYVIKPRDAQSTLLKGEKL

SEQ ID NO: 561 - protein, 421 aa, Escherichia coli
MSNNEFHQRRLSATPRGVGVMCNFFAQSAENATLKDVEGNEYIDFAAGIAVLNTGHRHPDLVAAVEQQLQQFTHTAYQIVPYESYVTLAEKINALAPVSGQAKTAFFTTGAEAVENAVKIARAHTGRPGVIAFSGGFHGRTYMTMALTGKVAPYKIGFGPFPGSVYHVPYPSDLHGISTQDSLDAIERLFKSDIEAKQVAAIIFEPVQGEGGFNVAPKELVAAIRRLCDEHGIVMIADEVQSGFARTGKLFAMDHYADKPDLMTMAKSLAGGMPLSGVVGNANIMDAPAPGGLGGTYAGNPLAVAAAHAVLNIIDKESLCERANQLGQRLKNTLIDAKESVPAIAAVRGLGSMIAVEFNDPQTGEPSAAIAQKIQQRALAQGLLLLTCGAYGNVIRFLYPLTIPDAQFDAAMKILQDALSD

SEQ ID NO: 562 - protein, 426 aa, Escherichia coli
MNSNKELMQRRSQAIPRGVGQIHPIFADRAENCRVWDVEGREYLDFAGGIAVLNTGHLHPKVVAAVEAQLKKLSHTCFQVLAYEPYLELCEIMNQKVPGDFAKKTLLVTTGSEAVENAVKIARAATKRSGTIAFSGAYHGRTHYTLALTGKVNPYSAGMGLMPGHVYRALYPCPLHGISEDDAIASIHRIFKNDAAPEDIAAIVIEPVQGEGGFYASSPAFMQRLRALCDEHGIMLIADEVQSGAGRTGTLFAMEQMGVAPDLTTFAKSIAGGFPLAGVTGRAEVMDAVAPGGLGGTYAGNPIACVAALEVLKVFEQENLLQKANDLGQKLKDGLLAIAEKHPEIGDVRGLGAMIAIELFEDGDHNKPDAKLTAEIVARARDKGLILLSCGPYYNVLRILVPLTIEDAQIRQGLEIISQCFDEAKQ

SEQ ID NO: 563 - protein, 474 aa, Escherichia coli
MQHKLLINGELVSGEGEKQPVYNPATGDVLLEIAEASAEQVDAAVRAADAAFAEWGQTTPKVRAECLLKLADVIEENGQVFAELESRNCGKPLHSAFNDEIPAIVDVFRFFAGAARCLNGLAAGEYLEGHTSMIRRDPLGVVASIAPWNYPLMMAAWKLAPALAAGNCVVLKPSEITPLTALKLAELAKDIFPAGVINILFGRGKTVGDPLTGHPKVRMVSLTGSIATGEHIISHTASSIKRTHMELGGKAPVIVFDDADIEAVVEGVRTFGYYNAGQDCTAACRIYAQKGIYDTLVEKLGAAVATLKSGAPDDESTELGPLSSLAHLERVGKAVEEAKATGHIKVITGGEKRKGNGYYYAPTLLAGALQDDAIVQKEVFGPVVSVTPFDNEEQVVNWANDSQYGLASSVWTKDVGRAHRVSARLQYGCTWVNTHFMLVSEMPHGGQKLSGYGKDMSLYGLEDYTVVRHVMVKH

SEQ ID NO: 564 - protein, 288 aa, Escherichia coli
MAEKKQWHETLHDQFGQYFAVDNVLYHEKTDHQDLIIFENAAFGRVMALDGVVQTTERDEFIYHEMMTHVPLLAHGHAKHVLIIGGGDGAMLREVTRHKNVESITMVEIDAGVVSFCRQYLPNHNAGSYDDPRFKLVIDDGVNFVNQTSQTFDVIISDCTDPIGPGESLFTSAFYEGCKRCLNPGGIFVAQNGVCFLQQEEAIDSHRKLSHYFSDVGFYQAAIPTYYGGIMTFAWATDNDALRHLSTEIIQARFLASGLKCRYYNPAIHTAAFALPQYLQDALASQPS

SEQ ID NO: 565 - protein, 264 aa, Escherichia coli
MKKLKLHGFNNLTKSLSFCIYDICYAKTAEERDGYIAYIDELYNANRLTEILSETCSIIGANILNIARQDYEPQGASVTILVSEEPVDPKLIDKTEHPGPLPETVVAHLDKSHICVHTYPESHPEGGLCTFRADIEVSTCGVISPLKALNYLIHQLESDIVTIDYRVRGFTRDINGMKHFIDHEINSIQNFMSDDMKALYDMVDVNVYQENIFHTKMLLKEFDLKHYMFHTKPEDLTDSERQEITAALWKEMREIYYGRNMPAV

SEQ ID NO: 566 - protein, 273 aa, Escherichia coli
MHDANIRVAIAGAGGRMGRQLIQAALALEGVQLGAALEREGSSLLGSDAGELAGAGKTGVTVQSSLDAVKDDFDVFIDFTRPEGTLNHLAFCRQHGKGMVIGTTGFDEAGKQAIRDAAADIAIVFAANFSVGVNVMLKLLEKAAKVMGDYTDIEIIEAHHRHKVDAPSGTALAMGEAIAHALDKDLKDCAVYSREGHTGERVPGTIGFATVRAGDIVGEHTAMFADIGERLEITHKASSRMTFANGAVRSALWLSGKESGLFDMRDVLDLNNL

SEQ ID NO: 567 - protein, 274 aa, Escherichia coli
MQQLQNIIETAFERRAEITPANADTVTREAVNQVIALLDSGALRVAEKIDGQWVTHQWLKKAVLLSFRINDNQVIEGAESRYFDKVPMKFADYDEARFQKEGFRVVPPAAVRQGAFIARNTVLMPSYVNIGAYVDEGTMVDTWATVGSCAQIGKNVHLSGGVGIGGVLEPLQANPTIIEDNCFIGARSEVVEGVIVEEGSVISMGVYIGQSTRIYDRETGEIHYGRVPAGSVVVSGNLPSKDGKYSLYCAVIVKKVDAKTRGKVGINELLRTID

SEQ ID NO: 568 - protein, 375 aa, Escherichia coli
MSCPVIELTQQLIRRPSLSPDDAGCQALLIERLQAIGFTVERMDFADTQNFWAWRGQGETLAFAGHTDVVPPGDADRWINPPFEPTIRDGMLFGRGAADMKGSLAAMVVAAERFVAQHPNHTGRLAFLITSDEEASAHNGTVKVVEALMARNERLDYCLVGEPSSIEVVGDVVKNGRRGSLTCNLTIHGVQGHVAYPHLADNPVHRAAPFLNELVAIEWDQGNEFFPATSMQIANIQAGTGSNNVIPGELFVQFNFRFSTELTDEMIKAQVLALLEKHQLRYTVDWWLSGQPFLTARGKLVDAVVNAVEHYNEIKPQLLTTGGTSDGRFIARMGAQVVELGPVNATIHKINECVNAADLQLLARMYQRIMEQLVA

SEQ ID NO: 569 - protein, 274 aa, Escherichia coli
MQFSKMHGLGNDFMVVDAVTQNVFFSPELIRRLADRHLGVGFDQLLVVEPPYDPELDFHYRIFNADGSEVAQCGNGARCFARFVRLKGLTNKRDIRVSTANGRMVLTVTDDDLVRVNMGEPNFEPSAVPFRANKAEKTYIMRAAEQTILCGVVSMGNPHCVIQVDDVDTAAVETLGPVLESHERFPERANIGFMQVVKREHIRLRVYERGAGETQACGSGACAAVAVGIQQGLLAEEVRVELPGGRLDIAWKGPGHPLYMTGPAVHVYDGFIHL

SEQ ID NO: 570 - protein, 420 aa, Escherichia coli
MPHSLFSTDTDLTAENLLRLPAEFGCPVWVYDAQIIRRQIAALKQFDVVRFAQKACSNIHILRLMREQGVKVDSVSLGEIERALAAGYNPQTHPDDIVFTADVIDQATLERVSELQIPVNAGSVDMLDQLGQVSPGHRVWLRVNPGFGHGHSQKTNTGGENSKHGIWYTDLPAALDVIQRHHLQLVGIHMHIGSGVDYAHLEQVCGAMVRQVIEFGQDLQAISAGGGLSVPYQQGEEAVDTEHYYGLWNAAREQIARHLGHPVKLEIEPGRFLVAQSGVLITQVRSVKQMGSRHFVLVDAGFNDLMRPAMYGSYHHISALAADGRSLEHAPTVETVVAGPLCESGDVFTQQEGGNVETRALPEVKAGDYLVLHDTGAYGASMSSNYNSRPLLPEVLFDNGQARLIRRRQTIEELLALELL

SEQ ID NO: 571 - protein, 715 aa, Escherichia coli
MNVIAILNHMGVYFKEEPIRELHRALERLNFQIVYPNDRDDLLKLIENNARLCGVIFDWDKYNLELCEEISKMNENLPLYAFANTYSTLDVSLNDLRLQISFFEYALGAAEDIANKIKQTTDEYINTILPPLTKALFKYVREGKYTFCTPGHMGGTAFQKSPVGSLFYDFFGPNTMKSDISISVSELGSLLDHSGPHKEAEQYIARVFNADRSYMVTNGTSTANKIVGMYSAPAGSTILIDRNCHKSLTHLMMMSDVTPIYFRPTRNAYGILGGIPQSEFQHATIAKRVKETPNATWPVHAVITNSTYDGLLYNTDFIKKTLDVKSIHFDSAWVPYTNFSPIYEGKCGMSGGRVEGKVIYETQSTHKLLAAFSQASMIHVKGDVNEETFNEAYMMHTTTSPHYGIVASTETAAAMMKGNAGKRLINGSIERAIKFRKEIKRLRTESDGWFFDVWQPDHIDTTECWPLRSDSTWHGFKNIDNEHMYLDPIKVTLLTPGMEKDGTMSDFGIPASIVAKYLDEHGIVVEKTGPYNLLFLFSIGIDKTKALSLLRALTDFKRAFDLNLRVKNMLPSLYREDPEFYENMRIQELAQNIHKLIVHHNLPDLMYRAFEVLPTMVMTPYAAFQKELHGMTEEVYLDEMVGRINANMILPYPPGVPLVMPGEMITEESRPVLEFLQMLCEIGAHYPGFETDIHGAYRQADGRYTVKVLKEESKK

SEQ ID NO: 572 - protein, 713 aa, Escherichia coli
MNIIAIMGPHGVFYKDEPIKELESALVAQGFQIIWPQNSVDLLKFIEHNPRICGVIFDWDEYSLDLCSDINQLNEYLPLYAFINTHSTMDVSVQDMRMALWFFEYALGQAEDIAIRMRQYTDEYLDNITPPFTKALFTYVKERKYTFCTPGHMGGTAYQKSPVGCLFYDFFGGNTLKADVSISVTELGSLLDHTGPHLEAEEYIARTFGAEQSYIVTNGTSTSNKIVGMYAAPSGSTLLIDRNCHKSLAHLLMMNDVVPVWLKPTRNALGILGGIPRREFTRDSIEEKVAATTQAQWPVHAVITNSTYDGLLYNTDWIKQTLDVPSIHFDSAWVPYTHFHPIYQGKSGMSGERVAGKVIFETQSTHKMLAALSQASLIHIKGEYDEEAFNEAFMMHTTTSPSYPIVASVETAAAMLRGNPGKRLINRSVERALHFRKEVQRLREESDGWFFDIWQPPQVDEAECWPVAPGEQWHGFNDADADHMFLDPVKVTILTPGMDEQGNMSEEGIPAALVAKFLDERGIVVEKTGPYNLLFLFSIGIDKTKAMGLLRGLTEFKRSYDLNLRIKNMLPDLYAEDPDFYRNMRIQDLAQGIHKLIRKHDLPGLMLRAFDTLPEMIMTPHQAWQRQIKGEVETIALEQLVGRVSANMILPYPPGVPLLMPGEMLTKESRTVLDFLLMLCSVGQHYPGFETDIHGAKQDEDGVYRVRVLKMAG

SEQ ID NO: 573 - protein, 315 aa, Escherichia coli
MPDMKLFAGNATPELAQRIANRLYTSLGDAAVGRFSDGEVSVQINENVRGGDIFIIQSTCAPTNDNLMELVVMVDALRRASAGRITAVIPYFGYARQDRRVRSARVPITAKVVADFLSSVGVDRVLTVDLHAEQIQGFFDVPVDNVFGSPILLEDMLQLNLDNPIVVSPDIGGVVRARAIAKLLNDTDMAIIDKRRPRANVSQVMHIIGDVAGRDCVLVDDMIDTGGTLCKAAEALKERGAKRVFAYATHPIFSGNAANNLRNSVIDEVVVCDTIPLSDEIKSLPNVRTLTLSGMLAEAIRRISNEESISAMFEH

SEQ ID NO: 574 - protein, 505 aa, Escherichia coli
MCGIVGIAGVMPVNQSIYDALTVLQHRGQDAAGIITIDANNCFRLRKANGLVSDVFEARHMQRLQGNMGIGHVRYPTAGSSSASEAQPFYVNSPYGITLAHNGNLTNAHELRKKLFEEKRRHINTTSDSEILLNIFASELDNFRHYPLEADNIFAAIAATNRLIRGAYACVAMIIGHGMVAFRDPNGIRPLVLGKRDIDENRTEYMVASESVALDTLGFDFLRDVAPGEAIYITEEGQLFTRQCADNPVSNPCLFEYVYFARPDSFIDKISVYSARVNMGTKLGEKIAREWEDLDIDVVIPIPETSCDIALEIARILGKPYRQGFVKNRYVGRTFIMPGQQLRRKSVRRKLNANRAEFRDKNVLLVDDSIVRGTTSEQIIEMAREAGAKKVYLASAAPEIRFPNVYGIDMPSATELIAHGREVDEIRQIIGADGLIFQDLNDLIDAVRAENPDIQQFECSVFNGVYVTKDVDQGYLDFLDTLRNDDAKAVQRQNEVENLEMHNEG

SEQ ID NO: 575 - protein, 429 aa, Escherichia coli
MKVLVIGNGGREHALAWKAAQSPLVETVFVAPGNAGTALEPALQNVAIGVTDIPALLDFAQNEKIDLTIVGPEAPLVKGVVDTFRAAGLKIFGPTAGAAQLEGSKAFTKDFLARHKIPTAEYQNFTEVEPALAYLREKGAPIVIKADGLAAGKGVIVAMTLEEAEAAVHDMLAGNAFGDAGHRIVIEEFLDGEEASFIVMVDGEHVLPMATSQDHKRVGDKDTGPNTGGMGAYSPAPVVTDDVHQRTMERIIWPTVKGMAAEGNTYTGFLYAGLMIDKQGNPKVIEFNCRFGDPETQPIMLRMKSDLVELCLAACESKLDEKTSEWDERASLGVVMAAGGYPGDYRTGDVIHGLPLEEVAGGKVFHAGTKLADDEQVVTNGGRVLCVTALGHTVAEAQKRAYALMTDIHWDDCFCRKDIGWRAIEREQN

SEQ ID NO: 576 - protein, 392 aa, Escherichia coli
MTLLGTALRPAATRVMLLGSGELGKEVAIECQRLGVEVIAVDRYADAPAMHVAHRSHVINMLDGDALRRVVELEKPHYIVPEIEAIATDMLIQLEEEGLNVVPCARATKLTMNREGIRRLAAEELQLPTSTYRFADSESLFREAVADIGYPCIVKPVMSSSGKGQTFIRSAEQLAQAWKYAQQGGRAGAGRVIVEGVVKFDFEITLLTVSAVDGVHFCAPVGHRQEDGDYRESWQPQQMSPLALERAQEIARKVVLALGGYGLFGVELFVCGDEVIFSEVSPRPHDTGMVTLISQDLSEFALHVRAFLGLPVGGIRQYGPAASAVILPQLTSQNVTFDNVQNAVGADLQIRLFGKPEIDGSRRLGVALATAESVVDAIERAKHAAGQVKVQG

SEQ ID NO: 577 - protein, 1295 aa, Escherichia coli
MMEILRGSPALSAFRINKLLARFQAARLPVHNIYAEYVHFADLNAPLNDDEHAQLERLLKYGPALASHAPQGKLLLVTPRPGTISPWSSKATDIAHNCGLQQVNRLERGVAYYIEAGTLTNEQWQQVTAELHDRMMETVFFALDDAEQLFAHHQPTPVTSVDLLGQGRQALIDANLRLGLALAEDEIDYLQDAFTKLGRNPNDIELYMFAQANSEHCRHKIFNADWVIDGEQQPKSLFKMIKNTFETTPDHVLSAYKDNAAVMEGSEVGRYFADHETGRYDFHQEPAHILMKVETHNHPTAISPWPGAATGSGGEIRDEGATGRGAKPKAGLVGFSVSNLRIPGFEQPWEEDFGKPERIVTALDIMTEGPLGGAAFNNEFGRPALNGYFRTYEEKVNSHNGEELRGYHKPIMLAGGIGNIRADHVQKGEINVGAKLVVLGGPAMNIGLGGGAASSMASGQSDADLDFASVQRDNPEMERRCQEVIDRCWQLGDANPILFIHDVGAGGLSNAMPELVSDGGRGGKFELREILSDEPGMSPLEIWCNESQERYVLAVAADQLPLFDELCKRERAPYAVIGEATEELHLSLHDRHFDNQPIDLPLDVLLGKTPKMTRDVQTLKAKGDALAREGITIADAVKRVLHLPTVAEKTFLVTIGDRSVTGMVARDQMVGPWQVPVANCAVTTASLDSYYGEAMAIGERAPVALLDFAASARLAVGEALTNIAATQIGDIKRIKLSANWMAAAGHPGEDAGLYEAVKAVGEELCPALGLTIPVGKDSMSMKTRWQEGNEEREMTSPLSLVISAFARVEDVRHTITPQLSTEDNALLLIDLGKGNNALGATALAQVYRQLGDKPADVRDVAQLKGFYDAIQALVAQRKLLAYHDRSDGGLLVTLAEMAFAGHCGIDADIATLGDDRLAALFNEELGAVIQVRAADREAVESVLAQHGLADCVHYVGQAVSGDRFVITANGQTVFSESRTTLRVWWAETTWQMQRLRDNPECADQEHQAKSNDADPGLNVKLSFDINEDVAAPYIATGARPKVAVLREQGVNSHVEMAAAFHRAGFDAIDVHMSDLLTGRTGLEDFHALVACGGFSYGDVLGAGEGWAKSILFNDRVRDEFATFFHRPQTLALGVCNGCQMMSNLRELIPGSELWPRFVRNTSDRFEARFSLVEVTQSPSLLLQGMVGSQMPIAVSHGEGRVEVRDAAHLAALESKGLVALRYVDNFGKVTETYPANPNGSPNGITAVTTESGRVTIMMPHPERVFRTVSNSWHPENWGEDGPWMRIFRNARKQLG

SEQ ID NO: 578 - protein, 345 aa, Escherichia coli
MTDKTSLSYKDAGVDIDAGNALVGRIKGVVKKTRRPEVMGGLGGFGALCALPQKYREPVLVSGTDGVGTKLRLAMDLKRHDTIGIDLVAMCVNDLVVQGAEPLFFLDYYATGKLDVDTASAVISGIAEGCLQSGCSLVGGETAEMPGMYHGEDYDVAGFCVGVVEKSEIIDGSKVSDGDVLIALGSSGPHSNGYSLVRKILEVSGCDPQTTELDGKPLADHLLAPTRIYVKSVLELIEKVDVHAIAHLTGGGFWENIPRVLPDNTQAVIDESSWQWPEVFNWLQTAGNVEHHEMYRTFNCGVGMIIALPAPEVDKALALLNANGENAWKIGIIKASDSEQRVVIE

SEQ ID NO: 579 - protein, 355 aa, Escherichia coli
MKQVCVLGNGQLGRMLRQAGEPLGIAVWPVGLDAEPAAVPFQQSVITAEIERWPETALTRELARHPAFVNRDVFPIIADRLTQKQLFDKLHLPTAPWQLLAERSEWPAVFDRLGELAIVKRRTGGYDGRGQWRLRANETEQLPAECYGECIVEQGINFSGEVSLVGARGFDGSTVFYPLTHNLHQDGILRTSVAFPQANAQQQAQAEEMLSAIMQELGYVGVMAMECFVTPQGLLINELAPRVHNSGHWTQNGASISQFELHLRAITDLPLPQPVVNNPSVMINLIGSDVNYDWLKLPLVHLHWYDKEVRPGRKVGHLNLTDSDTSRLTATLEALIPLLPPEYASGVIWAQSKFG

SEQ ID NO: 580 - protein, 169 aa, Escherichia coli
MSSRNNPARVAIVMGSKSDWATMQFAAEIFEILNVPHHVEVVSAHRTPDKLFSFAESAEENGYQVIIAGAGGAAHLPGMIAAKTLVPVLGVPVQSAALSGVDSLYSIVQMPRGIPVGTLAIGKAGAANAALLAAQILATHDKELHQRLNDWRKAQTDEVLENPDPRGAA

SEQ ID NO: 581 - protein, 237 aa, Escherichia coli [sequence omitted]

SEQ ID NO: 582 - protein, 456 aa, Escherichia coli
MELSSLTAVSPVDGRYGDKVSALRGIFSEYGLLKFRVQVEVRWLQKLAAHAAIKEVPAFAADAIGYLDAIVASFSEEDAARIKTIERTTNHDVKAVEYFLKEKVAEIPELHAVSEFIHFACTSEDINNLSHALMLKTARDEVILPYWRQLIDGIKDLAVQYRDIPLLSRTHGQPATPSTIGKEMANVAYRMERQYRQLNQVEILGKINGAVGNYNAHIAAYPEVDWHQFSEEFVTSLGIQWNPYTTQIEPHDYIAELFDCVARFNTILIDFDRDVWGYIALNHFKQKTIAGEIGSSTMPHKVNPIDFENSEGNLGLSNAVLQHLASKLPVSRWQRDLTDSTVLRNLGVGIGYALIAYQSTLKGVSKLEVNRDHLLDELDHNWEVLAEPIQTVMRRYGIEKPYEKLKELTRGKRVDAEGMKQFIDGLALPEEEKARLKAMTPANYIGRAITMVDELK

SEQ ID NO: 583 - protein, 529 aa, Escherichia coli
MQQRRPVRRALLSVSDKAGIVEFAQALSARGVELLSTGGTARLLAEKGLPVTEVSDYTGFPEMMDGRVKTLHPKVHGGILGRRGQDDAIMEEHQIQPIDMVVVNLYPFAQTVAREGCSLEDAVENIDIGGPTMVRSAAKNHKDVAIVVKSSDYDAIIKEMDDNEGSLTLATRFDLAIKAFEHTAAYDSMIANYFGSMVPAYHGESKEAAGRFPRTLNLNFIKKLDMRYGENSHQQAAFYIEENVKEASVATATQVQGKALSYNNIADTDAALECVKEFAEPACVIVKHANPCGVAIGNSILDAYDRAYKTDPTSAFGGIIAFNRELDAETAQAIISRQFVEVIIAPSASEEALKITAAKQNVRVLTCGQWGERVPGLDFKRVNGGLLVQDRDLGMVGAEELRVVTKRQPSEQELRDALFCWKVAKFVKSNAIVYAKNNMTIGIGAGQMSRVYSAKIAGIKAADEGLEVKGSSMASDAFFPFRDGIDAAAAAGVTCVIQPGGSIRDDEVIAAADEHGIAMLFTDMRHFRH

SEQ ID NO: 584 - protein, 488 aa, Escherichia coli
MLRIAKEALTFDDVLLVPAHSTVLPNTADLSTQLTKTIRLNIPMLSAAMDTVTEARLAIALAQEGGIGFIHKNMSIERQAEEVRRVKKHESGVVTDPQTVLPTTTLREVKELTERNGFAGYPVVTEENELVGIITGRDVRFVTDLNQPVSVYMTPKERLVTVREGEAREVVLAKMHEKRVEKALVVDDEFHLIGMITVKDFQKAERKPNACKDEQGRLRVGAAVGAGAGNEERVDALVAAGVDVLLIDSSHGHSEGVLQRIRETRAKYPDLQIIGGNVATAAGARALAEAGCSAVKVGIGPGSICTTRIVTGVGVPQITAVADAVEALEGTGIPVIADGGIRFSGDIAKAIAAGASAVMVGSMLAGTEESPGEIELYQGRSYKSYRGMGSLGAMSKGSSDRYFQSDNAADKLVPEGIEGRVAYKGRLKEIIHQQMGGLRSCMGLTGCGTIDELRTKAEFVRISGAGIQESHVHDVTITKESPNYRLGS

SEQ ID NO: 585 - protein, 525 aa, Escherichia coli
MTENIHKHRILILDFGSQYTQLVARRVRELGVYCELWAWDVTEAQIRDFNPSGIILSGGPESTTEENSPRAPQYVFEAGVPVFGVCYGMQTMAMQLGGHVEASNEREFGYAQVEVVNDSALVRGIEDALTADGKPLLDVWMSHGDKVTAIPSDFITVASTESCPFAIMANEEKRFYGVQFHPEVTHTRQGMRMLERFVRDICQCEALWTPAKIIDDAVARIREQVGDDKVILGLSGGVDSSVTAMLLHRAIGKNLTCVFVDNGLLRLNEAEQVLDMFGDHFGLNIVHVPAEDRFLSALAGENDPEAKRKIIGRVFVEVFDEEALKLEDVKWLAQGTIYPDVIESAASATGKAHVIKSHHNVGGLPKEMKMGLVEPLKELFKDEVRKIGLELGLPYDMLYRHPFPGPGLGVRVLGEVKKEYCDLLRRADAIFIEELRKADLYDKVSQAFTVFLPVRSVGVMGDGRKYDWVVSLRAVETIDFMTAHWAHLPYDFLGRVSNRIINEVNGISRVVYDISGKPPATIEWE

SEQ ID NO: 586 - protein, 207 aa, Escherichia coli
MAQGTLYIVSAPSGAGKSSLIQALLKTQPLYDTQVSVSHTTRQPRPGEVHGEHYFFVNHDEFKEMISRDAFLEHAEVFGNYYGTSREAIEQVLATGVDVFLDIDWQGAQQIRQKMPHARSIFILPPSKIELDRRLRGRGQDSEEVIAKRMAQAVAEMSHYAEYDYLIVNDDFDTALTDLKTIIRAERLRMSRQKQRHDALISKLLAD

SEQ ID NO: 587 - protein, 143 aa, Escherichia coli
MAIERTFSIIKPNAVAKNVIGNIFARFEAAGFKIVGTKMLHLTVEQARGFYAEHDGKPFFDGLVEFMTSGPIVVSVLEGENAVQRHRDLLGATNPANALAGTLRADYADSLTENGTHGSDSVESAAREIAYFFGEGEVCPRTR

SEQ ID NO: 588 - protein, 761 aa, Escherichia coli
MNQNLLVTKRDGSTERINLDKIHRVLDWAAEGLHNVSISQVELRSHIQFYDGIKTSDIHETIIKAAADLISRDAPDYQYLAARLAIFHLRKKAYGQFEPPALYDHVVKMVEMGKYDNHLLEDYTEEEFKQMDTFIDHDRDMTFSYAAVKQLEGKYLVQNRVTGEIYESAQFLYILVAACLFSNYPRETRLQYVKRFYDAVSTFKISLPTPIMSGVRTPTRQFSSCVLIECGDSLDSINATSSAIVKYVSQRAGIGINAGRIRALGSPIRGGEAFHTGCIPFYKHFQTAVKSCSQGGVRGGAATLFYPMWHLEVESLLVLKNNRGVEGNRVRHMDYGVQINKLMYTRLLKGEDITLFSPSDVPGLYDAFFADQEEFERLYTKYEKDDSIRKQRVKAVELFSLMMQERASTGRIYIQNVDHCNTHSPFDPAIAPVRQSNLCLEIALPTKPLNDVNDENGEIALCTLSAFNLGAINNLDELEELAILAVRALDALLDYQDYPIPAAKRGAMGRRTLGIGVINFAYYLAKHGKRYSDGSANNLTHKTFEAIQYYLLKASNELAKEQGACPWFNETTYAKGILPIDTYKKDLDTIANEPLHYDWEALRESIKTHGLRNSTLSALMPSETSSQISNATNGIEPPRGYVSIKASKDGILRQVVPDYEHLHDAYELLWEMPGNDGYLQLVGIMQKFIDQSISANTNYDPSRFPSGKVPMQQLLKDLLTAYKFGVKTLYYQNTRDGAEDAQDDLVPSIQDDGCESGACKI

SEQ ID NO: 589 - protein, 376 aa, Escherichia coli
MAYTTFSQTKNDQLKEPMFFGQPVNVARYDQQKYDIFEKLIEKQLSFFWRPEEVDVSRDRIDYQALPEHEKHIFISNLKYQTLLDSIQGRSPNVALLPLISIPELETWVETWAFSETIHSRSYTHIIRNIVNDPSVVFDDIVTNEQIQKRAEGISSYYDELIEMTSYWHLLGEGTHTVNGKTVTVSLRELKKKLYLCLMSVNALEAIRFYVSFACSFAFAERELMEGNAKIIRLIARDEALHLTGTQHMLNLLRSGADDPEMAEIAEECKQECYDLFVQAAQQEKDWADYLFRDGSMIGLNKDILCQYVEYITNIRMQAVGLDLPFQTRSNPIPWINTWLVSDNVQVAPQEVEVSSYLVGQIDSEVDTDDLSNFQL

SEQ ID NO: 590 - protein, 712 aa, Escherichia coli
MTPHVMKRDGCKVPFKSERIKEAILRAAKAAEVDDADYCATVAAVVSEQMQGRNQVDINEIQTAVENQLMSGPYKQLARAYIEYRHDRDIEREKRGRLNQEIRGLVEQTNASLLNENANKDSKVIPTQRDLLAGIVAKHYARQHLLPRDVVQAHERGDIHYHDLDYSPFFPMFNCMLIDLKGMLTQGFKMGNAEIEPPKSISTATAVTAQIIAQVASHIYGGTTINRIDEVLAPFVTASYNKHRKTAEEWNIPDAEGYANSRTIKECYDAFQSLEYEVNTLHTANGQTPFVTFGFGLGTSWESRLIQESILRNRIAGLGKNRKTAVFPKLVFAIRDGLNHKKGDPNYDIKQLALECASKRMYPDILNYDQVVKVTGSFKTPMGCRSFLGVWENENGEQIHDGRNNLGVISLNLPRIALEAKGDEATFWKLLDERLVLARKALMTRIARLEGVKARVAPILYMEGACGVRLNADDDVSEIFKNGRASISLGYIGIHETINALFGGEHVYDNEQLRAKGIAIVERLRQAVDQWKEETGYGFSLYSTPSENLCDRFCRLDTAEFGVVPGVTDKGYYTNSFHLDVEKKVNPYDKIDFEAPYPPLANGGFICYGEYPNIQHNLKALEDVWDYSYQHVPYYGTNTPIDECYECGFTGEFECTSKGFTCPKCGNHDASRVSVTRRVCGYLGSPDARPFNAGKQEEVKRRVKHLGNGQIG

SEQ ID NO: 591 - protein, 214 aa, Escherichia coli
MRIILLGAPGAGKGTQAQFIMEKYGIPQISTGDMLRAAVKSGSELGKQAKDIMDAGKLVTDELVIALVKERIAQEDCRNGFLLDGFPRTIPQADAMKEAGINVDYVLEFDVPDELIVDRIVGRRVHAPSGRVYHVKFNPPKVEGKDDVTGEELTTRKDDQEETVRKRLVEYHQMTAPLIGYYSKEAEAGNTKYAKVDGTKPVAEVRADLEKILG

SEQ ID NO: 592 - protein, 319 aa, Escherichia coli
MKLSRISAINWNKISDDKDLEVWNRLTSNFWLPEKVPLSNDIPAWQTLTVVEQQLTMRVFTGLTLLDTLQNVIGAPSLMPDALTPHEEAVLSNISFMEAVHARSYSSIFSTLCQTKDVDAAYAWSEENAPLQRKAQIIQQHYRGDDPLKKKIASVFLESFLFYSGFWLPMYFSSRGKLTNTADLIRLIIRDEAVHGYYIGYKYQKNMEKISLGQREELKSFAFDLLLELYDNELQYTDELYAETPWADDVKAFLCYNANKALMNLGYEPLFPAEMAEVNPAILAALSPNADENHDFFSGSGSSYVMGKAVETEDEDWNF

SEQ ID NO: 593 - protein, 714 aa, Escherichia coli
MATTTAECLTQETMDYHALNAMLNLYDSAGRIQFDKDRQAVDAFIATHVRPNSVTFSSQQQRLNWLVNEGYYDESVLNRYSRDFVITLFTHAHTSGFRFQTFLGAWKFYTSYTLKTFDGKRYLEDFADRVTMVALTLAQGDETLALQLTDEMLSGRFQPATPTFLNCGKQQRGELVSCFLLRIEDNMESIGRAVNSALQLSKRGGGVAFLLSNLREAGAPIKRIENQSSGVIPVMKMLEDAFSYANQLGARQGAGAVYLHAHHPDILRFLDTKRENADEKIRIKTLSLGVVIPDITFHLAKENAQMALFSPYDVERVYGKPFADVAISQHYDELVADERIRKKYLNARDFFQRLAEIQFESGYPYIMYEDTVNRANPIAGRINMSNLCSEILQVNSASEYDENLDYTRTGHDISCNLGSLNIAHTMDSPDFARTVETAVRGLTAVSDMSHIRSVPSIEAGNAASHAIGLGQMNLHGYLAREGIAYGSPEALDFTNLYFYAITWHALRTSMLLARERGETFAGFKQSRYASGEYFSQYLQGNWQPKTAKVGELFTRSGITLPTREMWAQLRDDVMRYGIYNQNLQAVPPTGSISYINHATSSIHPIVAKVEIRKEGKTGRVYYPAPFMTNENLALYQDAYEIGAEKIIDTYAEATRHVDQGLSLTLFFPDTATTRDINKAQIYAWRKGIKTLYYIRLRQMALEGTEIEGCVSCAL

SEQ ID NO: 594 - protein, 432 aa, Escherichia coli
MGNNVVVLGTQWGDEGKGKIVDLLTERAKYVVRYQGGHNAGHTLVINGEKTVLHLIPSGILRENVTSIIGNGVVLSPAALMKEMKELEDRGIPVRERLLLSEACPLILDYHVALDNAREKARGAKAIGTTGRGIGPAYEDKVARRGLRVGDLFDKETFAEKLKEVMEYHNFQLVNYYKAEAVDYQKVLDDTMAVADILTSMVVDVSDLLDQARQRGDFVMFEGAQGTLLDIDHGTYPYVTSSNTTAGGVATGSGLGPRYVDYVLGILKAYSTRVGAGPFPTELFDETGEFLCKQGNEFGATTGRRRRTGWLDTVAVRRAVQLNSLSGFCLTKLDVLDGLKEVKLCVAYRMPDGREVTTTPLAADDWKGVEPIYETMPGWSESTFGVKDRSGLPQAALNYIKRIEELTGVPIDIISTGPDRTETMILRDPFDA

SEQ ID NO: 595 - protein, 153 aa, Escherichia coli
MTHDNKLQVEAIKRGTVIDHIPAQIGFKLLSLFKLTETDQRITIGLNLPSGEMGRKDLIKIENTFLSEDQVDQLALYAPQATVNRIDNYEVVGKSRPSLPERIDNVLVCPNSNCISHAEPVSSSFAVRKRANDIALKCKYCEKEFSHNVVLAN

SEQ ID NO: 596 - protein, 311 aa, Escherichia coli; identical to SEQ ID NO: 504

SEQ ID NO: 597 - protein, 348 aa, Escherichia coli [sequence omitted]

SEQ ID NO: 598 - protein, 336 aa, Escherichia coli
MYYPFVRKALFQLDPERAHEFTFQQLRRITGTPFEALVRQKVPAKPVNCMGLTFKNPLGLAAGLDKDGECIDALGAMGFGSIEIGTVTPRPQPGNDKPRLFRLVDAEGLINRMGFNNLGVDNLVENVKKAHYDGVLGINIGKNKDTPVEQGKDDYLICMEKIYAYAGYIAINISSPNTPGLRTLQYGEALDDLLTAIKNKQNDLQAMHHKYVPIAVKIAPDLSEEELIQVADSLVRHNIDGVIATNTTLDRSLVQGMKNCDQTGGLSGRPLQLKSTEIIRRLSLELNGRLPIIGVGGIDSVIAAREKIAAGASLVQIYSGFIFKGPPLIKEIVTHI

SEQ ID NO: 599 - protein, 213 aa, Escherichia coli
MKPYQRQFIEFALSKQVLKFGEFTLKSGRKSPYFFNAGLFNTGRDLALLGRFYAEALVDSGIEFDLLFGPAYKGIPIATTTAVALAEHHDLDLPYCFNRKEAKDHGEGGNLVGSALQGRVMLVDDVITAGTAIRESMEIIQANGATLAGVLISLDRQERGRGEISAIQEVERDYNCKVISIITLKDLIAYLEEKPEMAEHLAAVKAYREEFGV

SEQ ID NO: 600 - protein, 245 aa, Escherichia coli
MTLTASSSSRAVTNSPVVVALDYHNRDDALAFVDKIDPRDCRLKVGKEMFTLFGPQFVRELQQRGFDIFLDLKFHDIPNTAAHAVAAAADLGVWMVNVHASGGARMMTAAREALVPFGKDAPLLIAVTVLTSMEASDLVDLGMTLSPADYAERLAALTQKCGLDGVVCSAQEAVRFKQVFGQEFKLVTPGIRPQGSEAGDQRRIMTPEQALSAGVDYMVIGRPVTQSVDPAQTLKAINASLQRSA

SEQ ID NO: 601 - protein, 241 aa, Escherichia coli
MATNAKPVYKRILLKLSGEALQGTEGFGIDASILDRMAQEIKELVELGIQVGVVIGGGNLFRGAGLAKAGMNRVVGDHMGMLATVMNGLAMRDALHRAYVNARLMSAIPLNGVCDSYSWAEAISLLRNNRVVILSAGTGNPFFTTDSAACLRGIEIEADVVLKATKVDGVFTADPAKDPTATMYEQLTYSEVLEKELKVMDLAAFTLARDHKLPIRVFNMNKPGALRRVVMGEKEGTLITE

SEQ ID NO: 602 - protein, 545 aa, Escherichia coli
MTTNYIFVTGGVVSSLGKGIAAASLAAILEARGLNVTIMKLDPYINVDPGTMSPIQHGEVFVTEDGAETDLDLGHYERFIRTKMSRRNNFTTGRIYSDVLRKERRGDYLGATVQVIPHITNAIKERVLEGGEGHDVVLVEIGGTVGDIESLPFLEAIRQMAVEIGREHTLFMHLTLVPYMAASGEVKTKPTQHSVKELLSIGIQPDILICRSDRAVPANERAKIALFCNVPEKAVISLKDVDSIYKIPGLLKSQGLDDYICKRFSLNCPEANLSEWEQVIFEEANPVSEVTIGMVGKYIELPDAYKSVIEALKHGGLKNRVSVNIKLIDSQDVETRGVEILKGLDAILVPGGFGYRGVEGMITTARFARENNIPYLGICLGMQVALIDYARHVANMENANSTEFVPDCKYPVVALITEWRDENGNVEVRSEKSDLGGTMRLGAQQCQLVDDSLVRQLYNAPTIVERHRHRYEVNNMLLKQIEDAGLRVAGRSGDDQLVEIIEVPNHPWFVACQFHPEFTSTPRDGHPLFAGFVKAASEFQKRQAK

SEQ ID NO: 603 - protein, 459 aa, Escherichia coli; identical to SEQ ID NO: 558

SEQ ID NO: 604 - DNA, 1503 bp, Saccharomyces cerevisiae
atgtcattcgacgacttacacaaagccactgagagagcggtcatccaggccgtggaccagatctgcgacgatttcgaggttacccccgagaagctggacgaattaactgcttacttcatcgaacaaatggaaaaaggtctagctccaccaaaggaaggccacacattggcctcggacaaaggtcttcctatgattccggcgttcgtcaccgggtcacccaacgggacggagcgcggtgttttactagccgccgacctgggtggtaccaatttccgtatatgttctgttaacttgcatggagatcatactttctccatggagcaaatgaagtccaagattcccgatgatttgctagacgatgagaacgtcacatctgacgacctgtttgggtttctagcacgtcgtacactggcctttatgaagaagtatcacccggacgagttggccaagggtaaagacgccaagcccatgaaactggggttcactttctcataccctgtagaccagacctctctaaactccgggacattgatccgttggaccaagggtttccgcatcgcggacaccgtcggaaaggatgtcgtgcaattgtaccaggagcaattaagcgctcagggtatgcctatgatcaaggttgttgcattaaccaacgacaccgtcggaacgtacctatcgcattgctacacgtccgataacacggactcaatgacgtccggagaaatctcggagccggtcatcggatgtattttcggtaccggtaccaatgggtgctatatggaggagatcaacaagatcacgaagttgccacaggagttgcgtgacaagttgataaaggagggtaagacacacatgatcatcaatgtcgaatgggggtccttcgataatgagctcaagcacttgcctactactaagtatgacgtcgtaattgaccagaaactgtcaacgaacccgggatttcacttgtttgaaaaacgtgtctcagggatgttcttgggtgaggtgttgcgtaacattttagtggacttgcactcgcaaggcttgcttttgcaacagtacaggtccaaggaacaacttcctcgccacttgactacacctttccagttgtcatccgaagtgctgtcgcatattgaaattgacgactcgacaggtctacgtgaaacagagttgtcattattacagagtctcagactgcccaccactccaacagagcgtgttcaaattcaaaaattggtgcgcgcgatttctaggagatctgcgtatttagccgccgtgccgcttgccgcgatattgatcaagacaaatgctttgaacaagagatatcatggtgaagtcgagatcggttgtgatggttccgttgtggaatactaccccggtttcagatctatgctgagacacgccttagccttgtcacccttgggtgccgagggtgagaggaaggtgcacttgaagattgccaaggatggttccggagtgggtgccgccttgtgtgcgcttgtagcatga

SEQ ID NO: 605 - DNA, 1518 bp, Saccharomyces cerevisiae
atgagtgaaggccccgtcaaattcgaaaaaaataccgtcatatctgtctttggtgcgtcaggtgatctggcaaagaagaagacttttcccgccttatttgggcttttcagagaaggttaccttgatccatctaccaagatcttcggttatgcccggtccaaattgtccatggaggaggacctgaagtcccgtgtcctaccccacttgaaaaaacctcacggtgaagccgatgactctaaggtcgaacagttcttcaagatggtcagctacatttcgggaaattacgacacagatgaaggcttcgacgaattaagaacgcagatcgagaaattcgagaaaagtgccaacgtcgatgtcccacaccgtctcttctatctggccttgccgccaagcgtttttttgacggtggccaagcagatcaagagtcgtgtgtacgcagagaatggcatcacccgtgtaatcgtagagaaacctttcggccacgacctggcctctgccagggagctgcaaaaaaacctggggcccctctttaaagaagaagagttgtacagaattgaccattacttgggtaaagagttggtcaagaatcttttagtcttgaggttcggtaaccagtttttgaatgcctcgtggaatagagacaacattcaaagcgttcagatttcgtttaaagagaggttcggcaccgaaggccgtggcggctatttcgactctataggcataatcagagacgtgatgcagaaccatctgttacaaatcatgactctcttgactatggaaagaccggtgtcttttgacccggaatctattcgtgacgaaaaggttaaggttctaaaggccgtggcccccatcgacacggacgacgtcctcttgggccagtacggtaaatctgaggacgggtctaagcccgcctacgtggatgatgacactgtagacaaggactctaaatgtgtcacttttgcagcaatgactttcaacatcgaaaacgagcgttgggagggcgtccccatcatgatgcgtgccggtaaggctttgaatgagtccaaggtggagatcagactgcagtacaaagcggtcgcatcgggtgtcttcaaagacattccaaataacgaactggtcatcagagtgcagcccgatgccgctgtgtacctaaagtttaatgctaagacccctggtctgtcaaatgctacccaagtcacagatctgaatctaacttacgcaagcaggtaccaagacttttggattccagaggcttacgaggtgttgataagagacgccctactgggtgaccattccaactttgtcagagatgacgaattggatatcagttggggcatattcaccccattactgaagcacatagagcgtccggacggtccaacaccggaaatttacccctacggatcaagaggtccaaagggattgaaggaatatatgcaaaaacacaagtatgttatgcccgaaaagcacccttacgcttggcccgtgactaagccagaagatacgaaggataattag

SEQ ID NO: 606 - DNA, 750 bp, Saccharomyces cerevisiae
atggtgacagtcggtgtgttttctgagagggctagtttgacccatcaattgggggaattcatcgtcaagaaacaagatgaggcgctgcaaaagaagtcagactttaaagtttccgttagcggtggctctttgatcgatgctctgtatgaaagtttagtagcggacgaatcactatcttctcgagtgcaatggtctaaatggcaaatctacttctctgatgaaagaattgtgccactgacggacgctgacagcaattatggtgccttcaagagagctgttctagataaattaccctcgactagtcagccaaacgtttatcccatggacgagtccttgattggcagcgatgctgaatctaacaacaaaattgctgcagagtacgagcgtatcgtacctcaagtgcttgatttggtactgttgggctgtggtcctgatggacacacttgttccttattccctggagaaacacataggtacttgctgaacgaaacaaccaaaagagttgcttggtgccacgattctcccaagcctccaagtgacagaatcaccttcactctgcctgtgttgaaagacgccaaagccctgtgttttgtggctgagggcagttccaaacaaaatataatgcatgagatctttgacttgaaaaacgatcaattgccaaccgcattggttaacaaattatttggtgaaaaaacatcctggttcgttaatgaggaagcttttggaaaagttcaaacgaaaactttttag

SEQ ID NO: 607 - DNA, 768 bp, Saccharomyces cerevisiae
atggtgaaattacaaaggtttagcgaaaagaaaagcctcatacacgaattcggcaagtttatccttgaaaagcaagaatcggcgttaacgggcgacgctgatgcagtgttcaatatcgccatcagtggaggatcgatgaaccaagcgctgtacgaaagtttggtaaatgacaaaaacatttttccacatattaagtggccacaatggagaatcttcttctgtgacgaaagattggttccatttgaggatccgcaaagtaactatggtcagttcaaaaaaacagttttggacccgctagtgcatcagggcaaccaattgaacttaggccccactgtatacactatcaacgaatcattaatcggtggcggtgaaacggccaatagaaagattgccgaagaatacgcttccatgctgcctgcatcattcgacctaatcttactcggatgcggagaagatggacatacatgctcgttgtttcccggggttgaatttaattaccttgtagaagagatggaccgcaaggttttatggtgtaataattcgcccaaggcacccaaggacaggatcacctttacattagcagtagtagccgaggctaaaagtgtgtgctttctcgttaggggagctgctaaaaaggctatcatgcatgacgtgttaatcgtaaaaaatagcgaactacctagtgtgctggttaatgaaatggtcggaaccaaagtaacttggtttctcgacgacgaagctggcgccttgattcctgaaaactgctaa

SEQ ID NO: 608 - DNA, 1470 bp, Saccharomyces cerevisiae
atgtctgctgatttcggtttgattggtttggccgtcatgggtcaaaatttgatcttgaacgctgctgaccacggtttcactgtttgtgcttacaacagaactcaatccaaggtcgaccatttcttggccaatgaagctaagggcaaatctatcatcggtgctacttccattgaagatttcatctccaaattgaagagacctagaaaggtcatgcttttggttaaagctggtgctccagttgacgctttgatcaaccaaatcgtcccacttttggaaaagggtgatattatcatcgatggtggtaactctcacttcccagattctaatagacgttacgaagaattgaagaagaagggtattcttttcgttggttctggtgtctccggtggtgaggaaggtgcccgttacggtccatctttgatgccaggtggttctgaagaagcttggccacatattaagaacatcttccaatccatctctgctaaatccgacggtgaaccatgttgcgaatgggttggcccagccggtgctggtcactacgtcaagatggttcacaacggtattgaatacggtgatatgcaattgatttgtgaagcttatgacatcatgaagagattgggtgggtttaccgataaggaaatcagtgacgtttttgccaaatggaacaatggtgtcttggattccttcttggtcgaaattaccagagatattttgaaattcgacgacgtcgacggtaagccattagttgaaaaaatcatggatactgctggtcaaaagggtactggtaagtggactgccatcaacgccttggatttgggtatgccagttactttgattggtgaagctgtctttgcccgttgtctatctgctttgaagaacgagagaattagagcctccaaggtcttaccaggcccagaagttccaaaagacgccgtcaaggacagagaacaatttgtcgatgatttggaacaagctttgtatgcttccaagattatttcttacgctcaaggtttcatgttgatccgtgaagctgctgctacttatggctggaaactaaacaaccctgccatcgctttgatgtggagaggtggttgtatcattagatctgttttcttgggtcaaatcacaaaggcctacagagaagaaccagatttggaaaacttgttgttcaacaagttcttcgctgatgccgtcaccaaggctcaatctggttggagaaagtcaattgcgttggctaccacctacggtatcccaacaccagccttttccaccgctttgtctttctacgatgggtacagatctgaaagattgccagccaacttactacaagctcaacgtgactactttggtgctcacactttcagagtgttgccagaatgtgcttctgacaacttgccagtagacaaggatatccatatcaactggactggccacggtggtaatgtttcttcctctacataccaagcttaa

SEQ ID NO: 609 - DNA, 1479 bp, Saccharomyces cerevisiae
atgtcaaaggcagtaggtgatttaggcttagttggtttagccgtgatgggtcaaaatttgatcttaaacgcagcggatcacggatttaccgtggttgcttataataggacgcaatcaaaggtagataggtttctagctaatgaggcaaaaggaaaatcaataattggtgcaacttcaattgaggacttggttgcgaaactaaagaaacctagaaagattatgcttttaatcaaagccggtgctccggtcgacactttaataaaggaacttgtaccacatcttgataaaggcgacattattatcgacggtggtaactcacatttcccggacactaacagacgctacgaagagctaacaaagcaaggaattctttttgtgggctctggtgtctcaggcggtgaagatggtgcacgttttggtccatctttaatgcctggtgggtcagcagaagcatggccgcacatcaagaacatctttcaatctattgccgccaaatcaaacggtgagccatgctgcgaatgggtggggcctgccggttctggtcactatgtgaagatggtacacaacggtatcgagtacggtgatatgcagttgatttgcgaggcttacgatatcatgaaacgaattggccggtttacggataaagagatcagtgaagtatttgacaagtggaacactggagttttggattctttcttgattgaaatcacgagggacattttaaaattcgatgacgtcgacggtaagccattggtggaaaaaattatggatactgccggtcaaaagggtactggtaaatggactgcaatcaacgccttggatttaggaatgccagtcactttaattggggaggctgttttcgctcgttgtttgtcagccataaaggacgaacgtaaaagagcttcgaaacttctggcaggaccaacagtaccaaaggatgcaatacatgatagagaacaatttgtgtatgatttggaacaagcattatacgcttcaaagattatttcatatgctcaaggtttcatgctgatccgcgaagctgccagatcatacggctggaaattaaacaacccagctattgctctaatgtggagaggtggctgtataatcagatctgtgttcttagctgagattacgaaggcttatagggacgatccagatttggaaaatttattattcaacgagttcttcgcttctgcagttactaaggcccaatccggttggagaagaactattgcccttgctgctacttacggtattccaactccagctttctctactgctttagcgttttacgacggctatagatctgagaggctaccagcaaacttgttacaagcgcaacgtgattattttggcgctcatacatttagaattttacctgaatgtgcttctgcccatttgccagtagacaaggatattcatatcaattggactgggcacggaggtaatatatcttcctcaacctaccaagcttaa

SEQ ID NO: 610 - DNA, 597 bp, Saccharomyces cerevisiae
atggatattattctgggcatccgtgtacaggattctgtcattctagcgtcttctaaggcagtcacaagaggtatttctgttttaaaagattctgatgataaaacgagacaattatcgccacatacattgatgagttttgccggtgaagctggtgacaccgttcaattcgccgagtacattcaagccaatatccaattatactccattagagaagattatgagctctctccacaagcagtatctagttttgttaggcaagaattagccaagtcaattaggtcgagaagaccataccaagtcaacgtattgattggaggctatgacaaaaagaagaacaaaccggaactatatcaaattgactacttgggtactaaagtcgaattaccctatggtgctcatggttactcggggttttacacattctctttactagatcatcattatagacctgatatgactactgaggagggtttagatttattaaaactatgtgtacaagagcttgaaaaaagaatgccaatggacttcaagggcgtcattgttaaaatcgtggataaagatggcataagacaagtagatgacttccaggcacagtga

SEQ ID NO: 611 - DNA, 1008 bp, Saccharomyces cerevisiae
atgtctgaaccagctcaaaagaaacaaaaggttgctaacaactctctagaacaattgaaagcctccggcactgtcgttgttgccgacactggtgatttcggctctattgccaagtttcaacctcaagactccacaactaacccatcattgatcttggctgctgccaagcaaccaacttacgccaagttgatcgatgttgccgtggaatacggtaagaagcatggtaagaccaccgaagaacaagtcgaaaatgctgtggacagattgttagtcgaattcggtaaggagatcttaaagattgttccaggcagagtctccaccgaagttgatgctagattgtcttttgacactcaagctaccattgaaaaggctagacatatcattaaattgtttgaacaagaaggtgtctccaaggaaagagtccttattaaaattgcttccacttgggaaggtattcaagctgccaaagaattggaagaaaaggacggtatccactgtaatttgactctattattctccttcgttcaagcagttgcctgtgccgaggcccaagttactttgatttccccatttgttggtagaattctagactggtacaaatccagcactggtaaagattacaagggtgaagccgacccaggtgttatttccgtcaagaaaatctacaactactacaagaagtacggttacaagactattgttatgggtgcttctttcagaagcactgacgaaatcaaaaacttggctggtgttgactatctaacaatttctccagctttattggacaagttgatgaacagtactgaacctttcccaagagttttggaccctgtctccgctaagaaggaagccggcgacaagatttcttacatcagcgacgaatctaaattcagattcgacttgaatgaagacgctatggccactgaaaaattgtccgaaggtatcagaaaattctctgccgatattgttactctattcgacttgattgaaaagaaagttaccgcttaa

SEQ ID NO: 612 - DNA, 2880 bp, Saccharomyces cerevisiae
atgactgttactactccttttgtgaatggtacttcttattgtaccgtcactgcatattccgttcaatcttataaagctgccatagatttttacaccaagtttttgtcattagaaaaccgctcttctccagatgaaaactccactttattgtctaacgattccatctctttgaagatccttctacgtcctgatgaaaaaatcaataaaaatgttgaggctcatttgaaggaattgaacagtattaccaagactcaagactggagatcacatgccacccaatccttggtatttaacacttccgacatcttggcagtcaaggacactctaaatgctatgaacgctcctcttcaaggctacccaacagaactatttccaatgcagttgtacactttggacccattaggtaacgttgttggtgttacttctactaagaacgcagtttcaaccaagccaactccaccaccagcaccagaagcttctgctgagtctggtctttcctctaaagttcactcttacactgatttggcttaccgtatgaaaaccaccgacacctatccatctctgccaaagccattgaacaggcctcaaaaggcaattgccgtcatgacttccggtggtgatgctccaggtatgaactctaacgttagagccatcgtgcgttccgctatcttcaaaggttgtcgtgcctttgttgtcatggaaggttatgaaggtttggttcgtggtggtccagaatacatcaaggaattccactgggaagacgtccgtggttggtctgctgaaggtggtaccaacattggtactgcccgttgtatggaattcaagaagcgcgaaggtagattattgggtgcccaacatttgattgaggccggtgtcgatgctttgatcgtttgtggtggtgacggttctttgactggtgctgatctgtttagatcagaatggccttctttgatcgaggaattgttgaaaacaaacagaatttccaacgaacaatacgaaagaatgaagcatttgaatatttgcggtactgtcggttctattgataacgatatgtccaccacggatgctactattggtgcttactctgccttggacagaatctgtaaggccatcgattacgttgaagccactgccaactctcactcaagagctttcgttgttgaagttatgggtagaaactgtggttggttagctttattagctggtatcgccacttccgctgactatatctttattccagagaagccagccacttccagcgaatggcaagatcaaatgtgtgacattgtctccaagcacagatcaaggggtaagagaaccaccattgttgttgttgcagaaggtgctatcgctgctgacttgaccccaatttctccaagcgacgtccacaaagttctagttgacagattaggtttggatacaagaattactaccttaggtcacgttcaaagaggtggtactgctgttgcttacgaccgtatcttggctactttacaaggtcttgaggccgttaatgccgttttggaatccactccagacaccccatcaccattgattgctgttaacgaaaacaaaattgttcgtaaaccattaatggaatccgtcaagttgaccaaagcagttgcagaagccattcaagctaaggatttcaagagagctatgtctttaagagacactgagttcattgaacatttaaacaatttcatggctatcaactctgctgaccacaacgaaccaaagctaccaaaggacaagagactgaagattgccattgttaatgtcggtgctccagctggtggtatcaactctgccgtctactcgatggctacttactgtatgtcccaaggtcacagaccatacgctatctacaatggttggtctggtttggcaagacatgaaagtgttcgttctttgaactggaaggatatgttgggttggcaatcccgtggtggttctgaaatcggtactaacagagtcactccagaagaagcagatctaggtatgattgcttactatttccaaaagtacgaatttgatggtttgatcatcgttggtggtttcgaagcttttgaatctttacatcaattagagagagcaagagaaagttatccagctttcagaatcccaatggtcttgataccagctactttgtctaacaatgttccaggtactgaatactctttgggttctgataccgctttgaatgctctaatggaatactgtgatgttgttaaacaatccgcttcttcaaccagaggtagagccttcgttgtcgattgtcaaggtggtaactcaggctatttggccacttacgcttctttggctgttggtgctcaagtctcttatgtcccagaagaaggtatttctttggagcaattgtccgaggatattgaatacttagctcaatcttttgaaaaggcagaaggtagaggtagatttggtaaattgattttgaagagtacaaacgcttctaaggctttatcagccactaaattggctgaagttattactgctgaagccgatggcagatttgacgctaagccagcttatccaggtcatgtacaacaaggtggtttgccatctccaattgatagaacaagagccactagaatggccattaaagctgtcggcttcatcaaagacaaccaagctgccattgctgaagctcgtgctgccgaagaaaacttcaacgctgatgacaagaccatttctgacactgctgctgtcgttggtgttaagggttcacatgtcgtttacaactccattagacaattgtatgactatgaaactgaagtttccatgagaatgccaaaggtcattcactggcaagctaccagactcattgctgaccatttggttggaagaaagagagttgattaa

SEQ ID NO: 613 - DNA, 2964 bp, Saccharomyces cerevisiae
atgcaatctcaagattcatgctacggtgttgcattcagatctatcatcacaaatgatgaagctttattcaagaagaccattcacttttatcacactctaggatttgcaactgtgaaagatttcaacaaattcaaacatggtgaaaatagcttactatcttcagggacttcccaagattccttgagagaagtttggttagaatctttcaagttgagtgaggttgatgcttctgggttccgtataccacaacaagaagctactaacaaggctcaaagtcaaggtgctctattaaagattcgtttagtgatgtctgctccaatcgatgaaactttcgacaccaacgaaaccgccacaatcacttatttctctactgatttgaacaagattgtcgagaaattcccaaaacaagccgaaaaattgtccgataccttagtgtttttgaaagatccaatgggcaacaacatcaccttctcaggcttagctaatgcaaccgattccgctccaacttccaaagatgctttcttagaagctacctccgaagacgaaatcatctctagagcttcttccgatgcttctgacttactaagacaaacattgggctcttctcaaaagaagaagaagattgctgtcatgacttctggtggtgattctccaggtatgaatgccgctgttcgtgccgttgttcgtacaggtatacatttcggctgtgatgtttttgctgtttacgaaggttacgaaggtttactaagaggcggtaaatatttaaagaaaatggcttgggaagatgtcagaggttggttaagtgaaggtggtactttgattggtactgctcgttctatggaattcagaaagcgtgagggtcgtagacaagctgcaggcaatttaatttcgcaaggtattgacgctttggttgtttgtggtggtgatggttctttaaccggtgctgatcttttcagacacgaatggccatctttggttgatgaattggttgcagaaggtagattcactaaagaagaagtcgccccatacaagaatttgtccattgttggtcttgtcggttccatcgataatgatatgtctggtactgactctaccattggtgcttattctgctttggaaagaatctgtgaaatggttgactacattgatgccaccgctaaatcccactcccgtgcctttgttgttgaagttatgggtagacattgtggttggttggccttgatggctggtattgctaccggtgccgattacatttttattccagaaagagctgttcctcacggaaaatggcaggacgaattgaaggaagtgtgccaaagacacagaagtaagggtagaagaaataacacaattattgtcgctgaaggtgctttagatgatcaattaaaccctgttactgccaatgacgtcaaagatgctttgattgaattgggtctagacaccaaggtaaccattctaggtcacgttcaaagaggtggtacagctgttgctcatgacagatggttagctactctacaaggtgtcgatgctgttaaggccgttctggaatttacccctgaaactccttctccattaattggtattttagaaaacaagataattagaatgccattggttgaatctgtgaagttgactaaatctgttgccactgccattgaaaacaaagatttcgataaggcaatttctttaagagacacagaatttattgaactttacgaaaacttcttatccactaccgttaaagatgatggttccgaattattgccagtatctgacagactaaacattggtattgtccatgttggtgccccatctgctgctttgaacgctgccacccgtgccgcaactctatactgtttgtctcacggccataaaccatacgctatcatgaatggtttcagtggattgattcaaaccggtgaagtgaaggaactatcatggattgatgtcgaaaactggcataacttgggtggttccgaaatcggtacgaacagatctgttgcttcagaagatttgggtaccattgcttactacttccaaaagaacaagctagacggtttgattattcttggtggttttgaaggtttcaggtccttgaagcaattgcgtgacggtagaacccaacacccaatctttaacattccaatgtgtttgattccagccactgtttctaacaacgttccaggtactgaatactcacttggtgttgatacctgtttgaacgcattagtcaattacactgatgacatcaaacagagtgcttctgcgacaagaagaagagtcttcgtctgtgaagtccaaggtggtcactctggttacatcgcttctttcactggtttaatcactggtgctgtttcagtgtacactccagaaaagaagatcgacttagcttctatcagagaagatataactctattaaaagagaactttcgtcacgacaaaggtgaaaacagaaacggtaagctattggttagaaacgaacaagcttctagcgtatatagcactcaattgttggctgacatcatctctgaagcaagcaagggtaagtttggtgttagaactgctatcccaggccatgttcaacaaggtggtgttccatcttctaaagaccgtgtcaccgcttccagatttgctgtcaaatgtatcaagtttatcgaacaatggaacaagaaaaatgaagcttctccaaacactgacgctaaggttttgagattcaagttcgatactcacggtgaaaaggtaccaactgttgagcacgaagatgactctgctgctgttatctgtgttaatggttctcacgtttccttcaagccaattgctaacctttgggaaaacgaaaccaacgttgaattaagaaagggttttgaagttcactgggctgaatacaacaagattggtgacatcctgtccggtagattaaagttgagagctgaggtagccgctttagccgctgaaaacaaatga

SEQ ID NO: 614 - DNA, 1080 bp, Saccharomyces cerevisiae
atgggtgttgaacaaatcttaaagagaaagaccggtgtcatcgttggtgaagatgtccacaacttattcacttacgctaaggaacacaagttcgctattccagctattaacgtcacctcttcttctactgccgtcgctgctttagaagctgctagagacagcaagtccccaatcattttgcaaacctctaacggtggtgctgcttacttcgctggtaagggtatctctaacgaaggtcaaaatgcttccatcaagggtgctattgccgctgcccactacatcagatccattgctccagcttacggtatcccagttgtcttacactctgaccactgtgccaagaagttgttgccatggttcgatggtatgttggaagctgatgaagcttacttcaaggaacacggtgaaccattattctcctcccacatgttggatttgtctgaagaaaccgatgaagaaaacatctctacttgtgtcaagtacttcaagagaatggccgctatggaccaatggttagaaatggaaatcggtattaccggtggtgaagaagatggtgttaacaacgaaaacgctgacaaggaagacttgtacaccaagccagaacaagtttacaacgtctacaaggctttgcacccaatctctccaaacttctccattgctgctgctttcggtaactgtcacggtttgtacgctggtgacatcgctttgagaccagaaatcttggctgaacaccaaaagtacaccagagaacaagttggttgcaaggaagaaaagccattgttcttggtcttccacggtggttccggttctactgtccaagaattccacactggtattgacaacggtgttgtcaaggtcaacttggacactgactgtcaatacgcttacttgactggtatcagagactacgtcttgaacaagaaggactacataatgtccccagtcggtaacccagaaggtccagaaaagccaaacaagaagttcttcgacccaagagtctgggttagagaaggtgaaaagaccatgggtgctaagatcaccaagtctttggaaactttccgtaccactaacactttataa

SEQ ID NO: 615 - DNA, 768 bp, Saccharomyces cerevisiae; identical to SEQ ID NO: 205

SEQ ID NO: 616 - DNA, 999 bp, Saccharomyces cerevisiae
atgatcagaattgctattaacggtttcggtagaatcggtagattggtcttgagattggctttgcaaagaaaagacattgaggttgttgctgtcaacgatccatttatctctaacgattatgctgcttacatggtcaagtacgattctactcatggtagatacaagggtactgtttcccatgacgacaagcacatcatcattgatggtgtcaagatcgctacctaccaagaaagagacccagctaacttgccatggggttctctaaagatcgatgtcgctgttgactccactggtgttttcaaggaattggacaccgctcaaaagcacattgacgctggtgccaagaaggttgtcatcactgctccatcttcttctgctccaatgtttgttgttggtgttaaccacactaaatacactccagacaagaagattgtctccaacgcttcttgtaccaccaactgtttggctccattggccaaggttatcaacgatgctttcggtattgaagaaggtttgatgaccactgttcactccatgaccgccactcaaaagactgttgatggtccatcccacaaggactggagaggtggtagaaccgcttccggtaacattatcccatcctctaccggtgctgctaaggctgtcggtaaggtcttgccagaattgcaaggtaagttgaccggtatggctttcagagtcccaaccgtcgatgtttccgttgttgacttgactgtcaagttggaaaaggaagctacttacgaccaaatcaagaaggctgttaaggctgccgctgaaggtccaatgaagggtgttttgggttacaccgaagatgccgttgtctcctctgatttcttgggtgacactcacgcttccatcttcgatgcctccgctggtatccaattgtctccaaagttcgtcaagttgatttcctggtacgataacgaatacggttactccgccagagttgttgacttgatcgaatatgttgccaaggcttaa

SEQ ID NO: 617 - DNA, 1200 bp, Saccharomyces cerevisiae
atgtctttatcttcaaagttgtctgtccaagatttggacttgaaggacaagcgtgtcttcatcagagttgacttcaacgtcccattggacggtaagaagatcacttctaaccaaagaattgttgctgctttgccaaccatcaagtacgttttggaacaccacccaagatacgttgtcttggcttctcacttgggtagaccaaacggtgaaagaaacgaaaaatactctttggctccagttgctaaggaattgcaatcattgttgggtaaggatgtcaccttcttgaacgactgtgtcggtccagaagttgaagccgctgtcaaggcttctgccccaggttccgttattttgttggaaaacttgcgttaccacatcgaagaagaaggttccagaaaggtcgatggtcaaaaggtcaaggcttccaaggaagatgttcaaaagttcagacacgaattgagctctttggctgatgtttacatcaacgatgccttcggtaccgctcacagagctcactcttctatggtcggtttcgacttgccacaacgtgctgccggtttcttgttggaaaaggaattgaagtacttcggtaaggctttggagaacccaaccagaccattcttggccatcttaggtggtgccaaggttgctgacaagattcaattgattgacaacttgttggacaaggtcgactctatcatcattggtggtggtatggctttcaccttcaagaaggttttggaaaacactgaaatcggtgactccatcttcgacaaggctggtgctgaaatcgttccaaagttgatggaaaaggccaaggccaagggtgtcgaagtcgtcttgccagtcgacttcatcattgctgatgctttctctgctgatgccaacaccaagactgtcactgacaaggaaggtattccagctggctggcaagggttggacaatggtccagaatctagaaagttgtttgctgctactgttgcaaaggctaagaccattgtctggaacggtccaccaggtgttttcgaattcgaaaagttcgctgctggtactaaggctttgttagacgaagttgtcaagagctctgctgctggtaacaccgtcatcattggtggtggtgacactgccactgtcgctaagaagtacggtgtcactgacaagatctcccatgtctctactggtggtggtgcttctttggaatta

SEQ ID NO: 618 - DNA, 744 bp, Saccharomyces cerevisiae
atgccaaagttagttttagttagacacggtcaatccgaatggaacgaaaagaacttattcaccggttgggttgatgttaaattgtctgccaagggtcaacaagaagccgctagagccggtgaattgttgaaggaaaagaaggtctacccagacgtcttgtacacttccaagttgtccagagctatccaaactgctaacattgctttggaaaaggctgacagattatggattccagtcaacagatcctggagattgaacgaaagacattacggtgacttacaaggtaaggacaaggctgaaactttgaagaagttcggtgaagaaaaattcaacacctacagaagatccttcgatgttccacctcccccaatcgacgcttcttctccattctctcaaaagggtgatgaaagatacaagtacgttgacccaaatgtcttgccagaaactgaatctttggctttggtcattgacagattgttgccatactggcaagatgtcattgccaaggacttgttgagtggtaagaccgtcatgatcgccgctcacggtaactccttgagaggtttggttaagcacttggaaggtatctctgatgctgacattgctaagttgaacatcccaactggtattccattggtcttcgaattggacgaaaacttgaagccatctaagccatcttactacttggacccagaagctgccgctgctggtgccgctgctgttgccaaccaaggtaagaaataa

SEQ ID NO: 619 - DNA, 1314 bp, Saccharomyces cerevisiae
atggctgtctctaaagtttacgctagatccgtctacgactcccgtggtaacccaaccgtcgaagtcgaattaaccaccgaaaagggtgttttcagatccattgtcccatctggtgcttctaccggtgtccacgaagctttggaaatgagagatggtgacaaatccaagtggatgggtaagggtgttttgcacgctgttaagaacgtcaacgatgtcattgctccagctttcgttaaggctaacattgatgttaaggaccaaaaggccgtcgatgacttcttgatttctttggacggtactgccaacaaatccaagttgggtgctaacgctatcttgggtgtttctttggctgcttccagagctgccgctgctgaaaagaatgtcccattatacaagcacttggctgacttgtctaagtccaagacctctccatacgttttgccagttccattcttgaacgttttgaacggtggttcccacgctggtggtgctttggctttgcaagaatttatgattgctccaactggtgctaagaccttcgctgaagctttgagaattggttccgaagtttaccacaacttgaagtctttgaccaagaagagatacggtgcttctgccggtaacgtcggtgacgaaggtggtgttgctccaaacattcaaactgctgaagaagctttggacttgattgttgacgctatcaaggctgctggtcacgacggtaagatcaagatcggtttggactgtgcttcctctgaattcttcaaggacggtaagtacgacttggacttcaagaatccaaactctgacaaatccaagtggttgactggtcctcaattggctgacttgtaccactccttgatgaagagatacccaattgtctccatcgaagatccatttgctgaagatgactgggaagcttggtctcacttcttcaagaccgctggtattcaaattgttgctgatgacttgactgtcaccaacccaaagagaattgctaccgctatcgaaaagaaggctgccgacgctttgttgttgaaggtcaaccaaatcggtaccttgtctgaatccatcaaggctgctcaagactctttcgctgccggttggggtgttatggtttcccacagatctggtgaaactgaagacactttcattgctgacttggtcgtcggtttgagaactggtcaaatcaagactggtgctccagctagatccgaaagattggctaaattgaaccaattgttgagaatcgaagaagaattaggtgacaacgctgttttcgctggtgaaaacttccaccacggtgacaaattataa

SEQ ID NO: 620 - DNA, 1314 bp, Saccharomyces cerevisiae
atggctgtctctaaagtttacgctagatccgtctacgactcccgtggtaacccaaccgtcgaagtcgaattaaccaccgaaaagggtgttttcagatccattgttccatctggtgcctccaccggtgtccacgaagctttggaaatgagagatgaagacaaatccaagtggatgggtaagggtgttatgaacgctgtcaacaacgtcaacaacgtcattgctgctgctttcgtcaaggccaacctagatgttaaggaccaaaaggccgtcgatgacttcttgttgtctttggatggtaccgccaacaagtccaagttgggtgctaacgctatcttgggtgtctccatggccgctgctagagccgctgctgctgaaaagaacgtcccattgtaccaacatttggctgacttgtctaagtccaagacctctccatacgttttgccagttccattcttgaacgttttgaacggtggttcccacgctggtggtgctttggctttgcaagaattcatgattgctccaactggtgctaagaccttcgctgaagccatgagaattggttccgaagtttaccacaacttgaagtctttgaccaagaagagatacggtgcttctgccggtaacgtcggtgacgaaggtggtgttgctccaaacattcaaaccgctgaagaagctttggacttgattgttgacgctatcaaggctgctggtcacgacggtaaggtcaagatcggtttggactgtgcttcctctgaattcttcaaggacggtaagtacgacttggacttcaagaacccagaatctgacaaatccaagtggttgactggtgtcgaattagctgacatgtaccactccttgatgaagagatacccaattgtctccatcgaagatccatttgctgaagatgactgggaagcttggtctcacttcttcaagaccgctggtatccaaattgttgctgatgacttgactgtcaccaacccagctagaattgctaccgccatcgaaaagaaggctgctgacgctttgttgttgaaggttaaccaaatcggtaccttgtctgaatccatcaaggctgctcaagactctttcgctgccaactggggtgttatggtttcccacagatctggtgaaactgaagacactttcattgctgacttggttgtcggtttgagaactggtcaaatcaagactggtgctccagctagatccgaaagattggctaagttgaaccaattgttgagaatcgaagaagaattgggtgacaaggctgtctacgccggtgaaaacttccaccacggtgacaagttgtaa

SEQ ID NO: 621 - DNA, 1503 bp, Saccharomyces cerevisiae
atgtctagattagaaagattgacctcattaaacgttgttgctggttctgacttgagaagaacctccatcattggtaccatcggtccaaagaccaacaacccagaaaccttggttgctttgagaaaggctggtttgaacattgtccgtatgaacttctctcacggttcttacgaataccacaagtctgtcattgacaacgccagaaagtccgaagaattgtacccaggtagaccattggccattgctttggacaccaagggtccagaaatcagaactggtaccaccaccaacgatgttgactacccaatcccaccaaaccacgaaatgatcttcaccaccgatgacaagtacgctaaggcttgtgacgacaagatcatgtacgttgactacaagaacatcaccaaggtcatctccgctggtagaatcatctacgttgatgatggtgttttgtctttccaagttttggaagtcgttgacgacaagactttgaaggtcaaggctttgaacgccggtaagatctgttcccacaagggtgtcaacttaccaggtaccgatgtcgatttgccagctttgtctgaaaaggacaaggaagatttgagattcggtgtcaagaacggtgtccacatggtcttcgcttctttcatcagaaccgccaacgatgttttgaccatcagagaagtcttgggtgaacaaggtaaggacgtcaagatcattgtcaagattgaaaaccaacaaggtgttaacaacttcgacgaaatcttgaaggtcactgacggtgttatggttgccagaggtgacttgggtattgaaatcccagccccagaagtcttggctgtccaaaagaaattgattgctaagtctaacttggctggtaagccagttatctgtgctacccaaatgttggaatccatgacttacaacccaagaccaaccagagctgaagtttccgatgtcggtaacgctatcttggatggtgctgactgtgttatgttgtctggtgaaaccgccaagggtaactacccaatcaacgccgttaccactatggctgaaaccgctgtcattgctgaacaagctatcgcttacttgccaaactacgatgacatgagaaactgtactccaaagccaacctccaccaccgaaaccgtcgctgcctccgctgtcgctgctgttttcgaacaaaaggccaaggctatcattgtcttgtccacttccggtaccaccccaagattggtttccaagtacagaccaaactgtccaatcatcttggttaccagatgcccaagagctgctagattctctcacttgtacagaggtgtcttcccattcgttttcgaaaaggaacctgtctctgactggactgatgatgttgaagcccgtatcaacttcggtattgaaaaggctaaggaattcggtatcttgaagaagggtgacacttacgtttccatccaaggtttcaaggccggtgctggtcactccaacactttgcaagtctctaccgtttaa

SEQ ID NO: 622 - DNA, 1263 bp, Saccharomyces cerevisiae
atgcttgctgcttcattcaaacgccaaccatcacaattggtccgcgggttaggagctgttcttcgcactcccaccaggataggtcatgttcgtaccatggcaactttaaaaacaactgataagaaggcccctgaggacatcgagggctcggacacagtgcaaattgagttgcctgaatcttccttcgagtcgtatatgctagagcctccagacttgtcttatgagacttcgaaagccaccttgttacagatgtataaagatatggtcatcatcagaagaatggagatggcttgtgacgccttgtacaaggccaagaaaatcagaggtttttgccatctatctgttggtcaggaggccattgctgtcggtatcgagaatgccatcacaaaattggattccatcatcacatcttacagatgtcacggtttcacttttatgagaggtgcctcagtgaaagccgttctggctgaattgatgggtagaagagccggtgtctcttatggtaagggtggttccatgcacctttacgctccaggcttctatggtggtaatggtatcgtgggtgcccaggttcctttaggtgcaggtttagcttttgctcaccaatacaagaacgaggacgcctgctctttcactttgtatggtgatggtgcctctaatcaaggtcaagtttttgaatctttcaacatggccaaattatggaatttgcccgtcgtgttttgctgtgagaacaacaagtacggtatgggtaccgccgcttcaagatcctccgcgatgactgaatatttcaagcgtggtcaatatattccaggtttaaaagttaacggtatggatattctagctgtctaccaagcatccaagtttgctaaggactggtgtctatccggcaaaggtcctctcgttctagaatatgaaacctataggtacggtggccattctatgtctgatcccggtactacctacagaactagagacgagattcagcatatgagatccaagaacgatccaattgctggtcttaagatgcatttgattgatctaggtattgccactgaagctgaagtcaaagcttacgacaagtccgctagaaaatacgttgacgaacaagttgaattagctgatgctgctcctcctccagaagccaaattatccatcttgtttgaagacgtctacgtgaaaggtacagaaactccaaccctaagaggtaggatccctgaagatacttgggacttcaaaaagcaaggttttgcctctagggattaa

SEQ ID NO: 623 - DNA, 1101 bp, Saccharomyces cerevisiae
atgttttccagactgccaacatcattggccagaaatgttgcacgtcgtgccccaacttcttttgtaagaccctctgcagcagcagcagcattgagattctcatcaacaaagacgatgaccgtcagagaggccttgaatagtgccatggcggaagaattggaccgtgatgatgatgtcttccttattggtgaagaagttgcacaatataacggggcttataaggtgtcaaagggtttattggacaggttcggtgaacgtcgtgtggttgacacacctattaccgaatacgggttcacaggtttggccgttggtgccgctttgaagggtttgaagccaattgtagagtttatgtcgttcaatttctctatgcaagctatcgatcatgttgtcaattccgctgcaaagactcactacatgtctggtggtactcaaaaatgtcaaatggtcttcagaggtcctaatggtgctgcagtgggtgttggtgctcaacattcacaggacttttctccttggtacggttccattccagggttaaaggtccttgtcccttattctgctgaagatgctaggggtttgttaaaggccgccatcagagatccaaaccctgttgtatttttagagaacgaattgttgtacggtgaatcttttgaaatctcagaagaagctttatcccctgagttcaccttgccatacaaggctaagatcgaaagagaaggtaccgatatttccattgttacgtacacaagaaacgttcagttttctttggaagccgctgaaattctacaaaagaaatatggtgtctctgcagaagttatcaacttgcgttctattagacctttagatactgaagctatcatcaaaactgtcaagaagacaaaccacttgattactgttgaatccactttcccatcatttggtgttggtgctgaaattgtcgcccaagttatggagtctgaagcctttgattacttggatgctccaatccaaagagttactggtgccgatgttccaacaccttacgctaaagaattagaagatttcgctttccctgatactccaaccatcgttaaagctgtcaaagaagtcttgtcaattgaataa

SEQ ID NO: 624 - DNA, 1500 bp, Saccharomyces cerevisiae
atgttaagaatcagatcactcctaaataataagcgtgccttttcgtccacagtcaggacattgaccattaacaagtcacatgatgtagtcatcatcggtggtggccctgctggttacgtggctgctatcaaagctgctcaattgggatttaacactgcatgtgtagaaaaaagaggcaaattaggcggtacctgtcttaacgttggatgtatcccctccaaagcacttctaaataattctcatttattccaccaaatgcatacggaagcgcaaaagagaggtattgacgtcaacggtgatatcaaaattaacgtagcaaacttccaaaaggctaaggatgacgctgttaagcaattaactggaggtattgagcttctgttcaagaaaaataaggtcacctattataaaggtaatggttcattcgaagacgaaacgaagatcagagtaactcccgttgatgggttggaaggcactgtcaaggaagaccacatactagatgttaagaacatcatagtcgccacgggctctgaagttacacccttccccggtattgaaatagatgaggaaaaaattgtctcttcaacaggtgctctttcgttaaaggaaattcccaaaagattaaccatcattggtggaggaatcatcggattggaaatgggttcagtttactctagattaggctccaaggttactgtagtagaatttcaacctcaaattggtgcatctatggacggcgaggttgccaaagccacccaaaagttcttgaaaaagcaaggtttggacttcaaattaagcaccaaagttatttctgcaaagagaaacgacgacaagaacgtcgtcgaaattgttgtagaagatactaaaacgaataagcaagaaaatttggaagctgaagttttgctggttgctgttggtagaagaccttacattgctggcttaggggctgaaaagattggattagaagtagacaaaaggggacgcctagtcattgatgaccaatttaattccaagttcccacacattaaagtggtaggagatgttacatttggtccaatgctggctcacaaagccgaagaggaaggtattgcagctgtcgaaatgttgaaaactggtcacggtcatgtcaactataacaacattccttcggtcatgtattctcacccagaagtagcatgggttggtaaaaccgaagagcaattgaaagaagccggcattgactataaaattggtaagttcccctttgcggccaattcaagagccaagaccaaccaagacactgaaggtttcgtgaagattttgatcgattccaagaccgagcgtattttgggggctcacattatcggtccaaatgccggtgaaatgattgctgaagctggcttagccttagaatatggcgcttccgcagaagatgttgctagggtctgccatgctcatcctactttgtccgaagcatttaaggaagctaacatggctgcctatgataaagctattcattgttga

SEQ ID NO: 625 - DNA, 1449 bp, Saccharomyces cerevisiae
atgtctgcctttgtcagggtggttccaagaatatccagaagttcagtactcaccagatcattgagactgcaattgagatgctacgcatcgtacccagagcacaccattattggtatgccggcactgtctcctacgatgacgcaaggtaatcttgctgcttggactaagaaggaaggtgaccaattgtctcccggtgaagttattgccgaaatagaaacagacaaggctcaaatggactttgagttccaagaagatggttacttagccaagattctagttcctgaaggtacaaaggacattcctgtcaacaagcctattgccgtctatgtggaggacaaagctgatgtgccagcttttaaggactttaagctggaggattcaggttctgattcaaagaccagtacgaaggctcagcctgccgaaccacaggcagaaaagaaacaagaagcgccagctgaagagaccaagacttctgcacctgaagctaagaaatctgacgttgctgctcctcaaggtaggatttttgcctctccacttgccaagactatcgccttggaaaagggtatttctttgaaggatgttcacggcactggaccccgcggtagaattaccaaggctgacattgagtcatatctagaaaagtcgtctaagcagtcttctcaaaccagtggtgctgccgccgccactcctgccgccgctacctcaagcactactgctggctctgctccatcgccttcttctacagcatcatatgaggatgttccaatttcaaccatgagaagcatcattggagaacgtttattgcaatctactcaaggcattccatcatacatcgtttcctccaagatatccatctccaaacttttgaaattgagacagtccttgaacgctacagcaaacgacaagtacaaactgtccattaatgacctattagtaaaagccatcactgttgcggctaagagggtgccagatgccaatgcctactggttacctaatgagaacgttatccgtaaattcaagaatgtcgatgtctcagtcgctgttgccacaccaacaggattattgacaccaattgtcaagaattgtgaggccaagggcttgtcgcaaatctctaacgaaatcaaggaactagtcaagcgtgccagaataaacaaattggcaccagaggaattccaaggtgggaccatttgcatatccaatatgggcatgaataatgctgttaacatgtttacttcgattatcaacccaccacagtctacaatcttggccatcgctactgttgaaagggtcgctgtggaagacgccgctgctgagaacggattctcctttgataaccaggttaccataacagggacctttgatcatagaaccattgatggcgccaaaggtgcagaattcatgaaggaattgaaaactgttattgaaaatcctttggaaatgctattgtga

SEQ ID NO: 626 - DNA, 1461 bp, Saccharomyces cerevisiae
atggtacaaaggcttctaccgggcgcacatatatgcagaaggtccttcaattcgtctgcaattataaagtcttctgcattgactctcaaggaagcattagaaaacgtgatacctaagaaaagagatgctgtgaagaaattgaaggcctgttatggcagcacgtttgtcggaccgattaccatttcatcagttctaggtgggatgagaggtaatcagtcaatgttttggcaaggaacatcattagatcccgaacatggcattaaatttcaaggtttaacgattgaagaatgtcaaaatagattacctaatacaggtattgatggcgataatttcctgccagaatcaatgttatggctgttgatgacaggtggtgtgccaactttccagcaagctgcttctttcaggaaagaattggctattcgtggaaggaaattgccacattatacagagaaagttttgtcaagtttacccaaagatatgcaccctatgacccaacttgcaattggtttagcatcaatgaacaaaggatccctctttgctacaaactaccaaaagggcctcataggaaagatggaattttggaaagatactcttgaagattcgctaaatttaattgcttcactcccgctgctgactgggagaatttattcgaacattacaaatgagggacacccattaggtcaatatagtgaggaggtggattggtgtacaaacatatgttccctgctcggcatgacaaatggaacgaactcttctaatacatgcaaccttacttcccagcaatccctggacttcataaacttgatgcggttatataccggtatacatgtagaccatgaaggtggtaatgtttctgctcacaccacccacttggttggaagtgcgttgagtgacccgtatctcagctattcatctggaataatgggattagcgggtcctttgcatgggttagcagcacaagaagtagtaaggtttctcatagagatgaactctaatatttccagcattgcacgagaacaagaaatcaaagattatctttggaaaattttgaattcaaaccgtgtgatccccggttatgggcacgcagttttgcgtaaaccggatcctcgatttacagcaatgcttgaatttgcgcaaaagaggcctattgaatttgagaacgacaagaacgttttgttgatgcaaaaattggcagaaatagcgcctaaggttttgttggaacacggaaagagtaagaatccatttcccaatgttgactctgcatcggggattttgttttatcattatggaatcagggaattattattctttaccgtcatttttgggtgttcaagggccatgggacccttgacacaacttgtttgggatcgcattctaggtttaccaattgaaaggcccaagagtttgaacttggagggtctggaagcacttaccaaagcaagcaatgttaacaagttgtaa

SEQ ID NO: 627 - DNA, 2337 bp, Saccharomyces cerevisiae
atgctgtctgcacgttctgccatcaagagacccattgttcgtggtcttgcgacagtctccaacttgactagagattcaaaagtcaaccaaaacttattagaagatcattcttttattaactacaagcagaatgtggaaacgctggatatcgtaagaaaaagattaaacaggccatttacctacgcggaaaagattttgtacggtcacttggatgaccctcatggtcaagatattcagagaggtgtttcatacctaaaattaagaccagatcgtgttgcctgtcaagatgctactgctcaaatggctattttacaatttatgtccgctggtttaccacaggttgctaagccagtcactgtccactgtgaccatttgattcaagcacaagttggtggtgaaaaagatttgaagagagctatagatctaaacaaggaagtttatgatttcttggcctctgccactgcgaaatataacatgggtttctggaagccaggttccggtatcattcaccaaattgttctggaaaactacgctttcccaggtgctttgatcattggtactgactcccatacaccaaatgctggtggtttaggtcaattggctattggtgttggtggtgctgatgccgttgatgttatggcaggtcgtccatgggaattgaaggctccaaagatcttaggtgttaagttgactggtaagatgaacggttggacttctccaaaggatattattttgaaattggctggtatcacaactgtcaaaggtggtactggtaaaattgttgaatatttcggtgatggtgttgacaccttctccgctactggtatgggtaccatttgtaatatgggtgctgaaatcggtgctaccacatctgttttcccattcaacaaatctatgattgaatatttggaagcaactggtcgtggtaagatcgctgactttgctaaattataccacaaggacctattatctgctgataaggatgctgaatacgatgaggtcgtcgaaattgacttgaacactctggaaccatacatcaatgggccatttacccccgatttggctactccagtttctaagatgaaggaagttgctgttgctaataactggccattggatgtcagagtcggtttgatcggttcttgtaccaattcctcttatgaagatatgtctcgttcagcatccattgtcaaggatgctgctgctcatggtttgaaatccaagaccattttcactgttactccaggttctgaacaaatcagagccactattgaacgtgatggccaattagaaaccttcaaagaatttggtggtatcgttttggcaaacgcctgtggcccatgtattggtcaatgggatcgtagagatatcaagaaaggtgacaagaatactatcgtttcctcttacaacagaaatttcacttctagaaatgatggtaacccacaaactcatgcttttgttgcatctccagaattagtaactgcgttcgccattgcgggtgatttgagattcaaccctctaacagacaaattaaaggacaaggatggtaatgagttcatgttgaaaccaccacatggtgatggtttgcctcaaagaggttatgatgctggtgagaacacttaccaagctccacctgcagaccgtagcaccgttgaagttaaagtttctccaacttcagaccgtctacaactgttgaaaccattcaaaccttgggatggtaaggatgctaaagacatgccaatcttgattaaggccgtcggtaagacaactactgatcatatttctatggctggtccatggttgaaatacagaggtcatttagaaaacatttctaataactatatgattggtgctattaatgctgaaaacaagaaggctaactgtgttaaaaatgtatatactggtgaatacaaaggtgttccagacactgctagagattacagagaccaaggtatcaagtgggttgttattggtgatgaaaactttggtgaaggttcctctcgtgaacacgctgctttggaaccaagattcttgggcggtttcgctatcatcacaaagtctttcgctcgtatccatgaaactaacttgaaaaaacaaggtctattgccattgaacttcaagaacccagctgactatgacaagatcaaccctgatgacagaatcgatattctgggtctagctgaattggctccaggtaagcctgtaacaatgagagttcatccaaagaatggtaagccatgggatgctgtgttgacccatactttcaacgatgagcaaattgaatggttcaaatatggttctgccttaaataaaattaaggccgatgagaagaaataa

SEQ ID NO: 628 - DNA, 990 bp, Saccharomyces cerevisiae
atgttaagatctaccgtttcaaaagcttctctcaaaatttgtcgtcactttcacagagaatctattccttacgataagacgatcaaaaatttgctgcttcccaaggacaccaaggtgatctttcaggggttcacaggtaaacaaggtacttttcatgccagcatctctcaagaatatggtacaaatgttgtgggtggtacgaacccaaaaaaggcgggtcaaacacatttaggccaacctgtctttgcctctgtgaaggacgcgattaaggagactggagccactgccagtgccatctttgttcctccaccgatcgcagctgctgccattaaagaatctattgaagctgaaattccgttagctgtatgtatcactgaaggtattcctcaacatgacatgttatacattgcagaaatgttgcagacacaagataaaacaagattagttgggcccaactgccctggtatcattaacccagcaacaaaggtaagaattggtatccagcccccaaaaatttttcaagctggtaaaatcggtattatttccagatcgggaactttgacatacgaagctgttcagcaaactacaaaaactgaccttggtcaatcactggttattggtatgggtggtgatgcttttcccggtactgattttattgacgccttgaaattatttctagaagatgaaactacagaaggtattattatgttaggtgaaataggtggtaaggccgaaatcgaagctgctcaatttctcaaagaatacaactttagcaggagtaagccgatgccggtggcatctttcatcgcaggaactgttgctggtcaaatgaaaggtgttagaatgggtcactccggtgcaattgtagaaggatctggaactgatgcagaatccaaaaaacaagctttgagagatgttggtgttgccgtcgttgaatctccaggttacttaggtcaagctttactggatcaatttgccaaatttaaatga

SEQ ID NO: 629 - DNA, 1284 bp, Saccharomyces cerevisiae
atgtactcaagaaaatccttatccctaatttcaaagtgtgggcaattaagcaggctaaacgcgcaagctgctttacaagcaaggagacacttgtcaattcatgaatacaggtcagctcagttattgagggaatacggtattggtactccagaaggatttccagcgttcactcccgaagaggctttcgaagcagccaagaaattaaacactaacaaactggtcatcaaggcgcaggcattgaccggaggtagaggtaaaggtcacttcgacaccggttacaaaagcggtgttcacatgatcgaaagtcctcagcaggcagaggatgttgcaaaagaaatgctcaatcataacctgattactaaacagacgggaatagcggggaagccagtatctgctgtatatatagtgaaaagagtagatacaaagcatgaagcttatttatctattctaatggacagacaaaccaagaaaccgatgatcattgcgtccagtcaaggtggtatgaatattgaagaggtggctgagagaaccccagatgctataaagaaattttcaattgaaacttcaaagggattgagcccacaaatggccaaggatgttgccaagagtctcggtttcagtcccgatgcacaagacgaggcagcaaaagctgtttccaatttgtataaaatattcatggaaagggatgctacacaagtggagattaaccctttgagtgaaattgaacatgatccaacccacaaaatcatgtgtacagacgccaaatttgggtttgatgataacgcatcattcagacaggaaaagatatattcctggagggacttatcacaagaagatcctgatgaagttaaggcaaagaagtatgatttgaattttgttaagttgaagggtaacattggatgtttagtcaatggtgctggtttggctatggctactatggatgtcatcaaattaaatggaggcgatcctgcgaactttttggattgtggtggtggtgccacccctgagaccatcaaacaaggtttcgaattgatcttatccaataagaacgtagatgcaattttcgtcaatattttcggcggtatcgtaagatgtgactatgttgccctggggctggtagaagccgccagagaactagaagttagggtccccattgtggcacgtttgcaaggtaccaaagtagaagaaggccgcgacattatcaataagtcaggcgtgaagatttattcgtttgatgaattagatcctgctgctaaaaaggtcgttgaattgacccaaaattaa

SEQ ID NO: 630 - DNA, 1923 bp, Saccharomyces cerevisiae
atgctatcgctaaaaaaatcagcgctctccaagttgactttgctcagaaacacaagaacatttacatcgtcagctttggtgcgccaaacgcagggctctgtaaacggttccgcgtccagatctgcagacgggaagtaccacataatagatcacgagtatgactgtgtggtaatcggtgccggtggtgccggccttagagcggcctttggtcttgccgaggcgggctacaagactgcttgtatatccaagcttttccccaccagatcccacactgttgctgctcagggtggtatcaatgccgctctgggaaatatgcacaaggataactggaaatggcatatgtacgatactgtgaaaggatctgattggctaggtgaccaggactccatccattacatgaccagggaagcgcccaaatcgatcattgaactggaacactatggtgttcctttttcaagaactgaaaacggtaagatctaccaaagagcctttggtggtcagaccaaggagtacggtaagggtgctcaggcctatagaacatgcgctgtcgcagacaggacaggacatgctcttttacacacgctttatggccaagctttaagacatgacacacatttctttattgagtactttgccctcgatctgttgacccataatggcgaggtcgttggtgtcatcgcttataatcaggaagacggtaccatccacagattcagagcacacaagaccattattgccactggtggctatggtagagcatacttctcttgtacctctgctcacacatgtacgggtgacggtaatgccatggtttcgcgtgctggtttccccttgcaagatttagagtttgttcaattccatccttcaggtatatatgggtctggttgcttaatcactgaaggtgctcgtggtgaaggtggttttttggttaattctgaaggtgaaagattcatggaacgttacgctcctacggccaaggatctagcttgtagagatgtcgtttccagagcaatcaccatggagatcagagaaggcagaggtgttggtaagaaaaaggaccacatgtacttacaattgagccatctacctccggaagttctaaaggaaagattgccaggtatctctgaaacagcagccatttttgctggtgtagacgtcaccaaggaacctattcccattattcctaccgtccactataacatgggtggtattcccacgaagtggaatggtgaggcattaaccattgatgaagaaactggcgaagacaaggttattcccggtttaatggcttgtggtgaagccgcttgtgtttctgtccatggtgccaatagattaggtgccaattccttgttggatcttgttgtctttggtcgtgctgttgcccatacggttgctgacactttacagcctgggttgccacacaaaccactaccttctgatttgggtaaagaatccatcgcaaacttggataaactaagaaatgctaatggttcaagatctacggcagaaattagaatgaatatgaaacaaactatgcaaaaggatgtttccgtctttagaacacaatcatctttagatgaaggtgttcggaacattactgcagtagagaagacctttgatgatgtgaagacgaccgatagatcaatgatctggaattctgacttggttgaaactctggagctacagaacttattaacctgtgcctcccaaacagctgtttccgctgctaatagaaaggaatcccgtggtgctcatgcaagagaggattatccaaatagagatgacgaacattggatgaagcatacattatcctggcaaaaggacgtcgctgccccagtgactttgaaatacagaagggttatcgatcacactttggacgaaaaggaatgtccttccgtacctccaactgtaagagcctactaa

SEQ ID NO: 631 - DNA, 801 bp, Saccharomyces cerevisiae
atgttgaacgtgctattgagaaggaaggccttttgtttggtgacgaagaagggtatggctactgccacaacagctgcagctacgcatacccccagattgaaaacttttaaagtttacagatggaatccagacgagccaagtgctaaacctcatttacagtcatatcaagtggatctgaatgactgtgggcccatggtacttgatgcgctgttaaagatcaaagacgaacaggattctaccctaacttttagaagatcatgtagagaaggtatctgcggttcatgtgccatgaacattggcggtagaaacacgctagcttgtatatgtaagatcgaccagaacgaatccaaacaactcaagatctatccattaccccacatgtttattgtcaaagatttggtacctgatttaactaacttctaccaacaatacaaatctatccaaccttacttacagagatcatcgtttccaaaggatggaacggaagtgctacaaagtattgaagatcgtaagaaactggatggtctttacgaatgtattctgtgtgcatgctgctctacttcatgtccatcgtactggtggaaccaagaacagtatttgggccctgccgtgctaatgcaagcctaccgttggctaattgactctagagaccaagctacaaagacaagaaaggccatgctaaacaactccatgtcattgtacagatgtcacaccatcatgaactgtactagaacttgtccaaagggcttgaatcctggtttggctattgctgaaattaagaaatctttggcatttgcctag

SEQ ID NO: 632 - DNA, 597 bp, Saccharomyces cerevisiae
atgtctgcaatgatggtcaagttaggactgaataagtcggctctattactgaaaccctccgccttttcaagagcagctgccttgagctcctcgaggaggctgctttttaatacagctagaacaaacttcctttctacctcaccattgaagaatgtggccagtgaaatgaacaccaaagcggcaattgctgaagaacaaatattaaacaagcaaagagcaaagagacctatttctccacatctgaccatttaccagccacaattaacttggtacctgtcttctcttcaccgtatttcgttggtgcttatgggactaggtttctacttgtttactatactcttcggagtctctggtttattaggtcttggattgactaccgaaaaggtttctaattggtaccatcagaagttttccaagattaccgaatggtccatcaagggttcctttgcttacttatttgcaattcactatggtggcgccattagacacttgatctgggataccgctaaggaattgacattgaaaggcgtttacagaactggttacgctctcattggtttcaccgccgttctcggtacttatttattaactttatga

SEQ ID NO: 633 - DNA, 546 bp, Saccharomyces cerevisiae
atgatgttgccaagatccatgaaatttatgactggaaggagaattttccatactgccacagtaagggccttccagtctaccgctaagaagagcttaactatcccatttttgcccgtattaccccagaaaccaggtggtgttaggggcactcccaatgatgcctacgtccccccccctgagaataaattagagggctcataccactggtatatggaaaaaatctttgccttgtccgtcgttccattggctacgacggctatgctgacaaccggtccgttatccactgcagctgattctttcttttctgtcatgcttttgggatattgttacatggaatttaactcttgtatcaccgattatatttctgaaagagtttatggtgtttggcacaagtacgccatgtatatgttgggccttggttctgcggtctccctttttggaatctataaactagaaaccgagaatgatggtgttgttggtttagtaaaaagtctatgggattcttccgagaaagacaacagtcaaaagattgaagccaagaagtag

SEQ ID NO: 634 - DNA, 1467 bp, Saccharomyces cerevisiae
atgttgagatttaccaattgtagttgcaagactttcgtaaaatcgtcatataagcttaatataagaagaatgaactcctcgttcagaactgaaaccgatgcatttggtgagatacacgtgcctgctgataagtactggggtgcccaaactcaaagatcctttcaaaacttcaagattggtggcgctcgtgaaagaatgccattgcctttggtgcatgcatttggtgttttgaagaaatctgccgcgattgtgaatgagtctctggggggattggatcccaagatctccaaggctattcaacaggccgctgacgaagtggcttctggtaagctagacgaccactttccattggttgttttccaaacgggttccggtacccagtctaacatgaatgctaatgaagttatttccaatcgtgccattgagatcctaggaggcaagattggatctaaacaagtccatccaaacaatcattgcaaccaatctcaatcatccaatgatactttccccactgtcatgcatatcgctgccagtttgcaaattcaaaacgagttgatacctgagttgaccaatttaaagaacgcccttgaagccaaatccaaggaatttgaccatattgtgaagatcggtagaacacacttgcaagatgccacgcctttgacactaggtcaagagttttccggttacgtgcaacaagttgagaacggtatccaaagagtggcacattctttgaaaacattgagtttcctggcacaaggtggtactgccgttggtacagggttgaacaccaagcccggattcgatgtcaagatagccgagcaaatttccaaagaaactggactaaagtttcaaaccgcccctaataagttcgaggctttggctgctcacgacgccattgtcgaatgtagcggtgctctaaacacccttgcttgttctcttttcaaaatagcgcaagatataagatacttagggtccgggccacgttgcggctaccatgaactaatgctgccagagaatgaaccaggttcctcaatcatgcctggtaaagttaacccaacccaaaacgaggcattgactcaagtgtgtgtgcaagtcatgggtaacaatgcagctatcacgtttgccggctctcaaggtcaattcgagttaaatgtcttcaagccagtcatgatcgccaatctattgaattcgatcaggttaattactgatgccgcatattcatttagagtgcactgtgttgaaggtatcaaagccaatgagcctcgtattcatgagttgttgactaaatctttaatgttagtcaccgctttgaaccctaagatcggttatgatgccgcttccaaggtcgccaagaatgctcataagaagggcattaccttgaaggaaagtgcattggaattgggtgtattgactgaaaaggaatttgatgaatgggttgttcctgaacacatgctaggtcctaaataa

SEQ ID NO: 635 - DNA, 1005 bp, Saccharomyces cerevisiae
atgttgtcaagagtagctaaacgtgcgttttcctctacagttgccaacccttataaagtgactgttttgggtgcaggcggtggtattggacaaccattgtctttgcttctaaagcttaaccataaagtcacggacttaagactgtacgacctaaagggcgcaaaaggtgttgccaccgatttgtctcatattccaacaaactccgtggtcaaggggtttactccagaagagccagacggattgaacaacgctttaaaggacacagacatggttttaattcctgctggtgtgcccagaaagcctggtatgacacgtgatgacttgttcgccatcaacgcaagcatcgttcgcgatttggcagcagcaaccgccgaatccgctcccaatgctgccattctggtcatttccaacccagtcaattctaccgttccaattgtcgcccaagtcttgaaaaacaagggtgtttacaacccaaagaaattgttcggtgtgactaccttggactctattagagccgccagattcatctcagaagtcgagaacaccgatccaactcaggaaagggttaacgtcatcggtggacattctggtattaccatcatcccattgatttcgcaaacaaaccataagttgatgtctgatgacaagagacacgaattgattcacagaatacagtttggtggtgacgaagtcgtcaaagcaaagaatggtgctggctctgctacgttgtcaatggcccatgctggtgctaaattcgctaacgctgttttgtccggtttcaaaggcgaaagagacgtcatcgagccttccttcgtggactctcccttgttcaaatccgaaggcatcgaattctttgcatctccggtcactttgggcccagatggtattgaaaagatccatccaataggtgagttatcttcagaagaagaagaaatgctacaaaaatgtaaagaaaccttgaagaagaatatcgaaaagggtgtcaactttgttgctagtaaatag

SEQ ID NO: 636 - DNA, 1134 bp, Saccharomyces cerevisiae
atgcctcactcagttacaccatccatagaacaagattcgttaaaaattgccattttaggtgctgccggtggtatcgggcagtcgttatcgctgcttttgaaagctcagttgcaataccagttaaaggagagcaaccggagcgttacccacattcatctggctctttacgatgtcaaccaagaagccatcaacggtgttaccgccgacttgtctcatatagacacccccatttccgtgtcgagccactctcctgcaggtggcattgagaactgtttgcataacgcttctattgttgtcattcctgcaggtgttccaagaaaacctggcatgactcgtgatgacttatttaacgtgaatgctggtatcattagccagctcggtgattctattgcagaatgttgtgatctttccaaggtcttcgttcttgtcatttccaaccctgttaattctttagtcccagtgatggtttctaacattcttaagaaccatcctcagtctagaaattccggcattgaaagaaggatcatgggtgtcaccaagctcgacattgtcagagcgtccacttttctacgtgagataaacattgagtcagggctaactcctcgtgttaactccatgcctgacgtccctgtaattggcgggcattctggcgagactattattccgttgttttcacagtcaaacttcctatcgagattaaatgaggatcaattgaaatatttaatacatagagtccaatacggtggtgatgaagtggtcaaggccaagaacggtaaaggtagtgctaccttatcgatggcccatgccggttataagtgtgttgtccaatttgtttctttgttattgggtaacattgagcagatccatggaacctactatgtgccattaaaagatgcgaacaacttccccattgctcctggggcagatcaattattgcctctggtggacggtgcagactactttgccataccattaactattactacaaagggtgtttcctatgtggattatgacatcgttaataggatgaacgacatggaacgcaaccaaatgttgccaatttgcgtctcccagttaaagaaaaatatcgataagggcttggaattcgttgcatcgagatctgcatcatcttaa

SEQ ID NO: 637 - DNA, 1032 bp, Saccharomyces cerevisiae
atggtcaaagtcgcaattcttggcgcttctggtggcgtgggacaaccgctatcattactgctaaaattaagcccttacgtttccgagctggcgttgtacgatatccgagctgcggaaggcattggtaaggatttatctcacatcaacaccaactcaagttgtgtcggttatgataaggatagtattgagaacaccttgtcaaatgctcaggtggtgctaataccggctggtgttcccagaaagcccggtttaactagagatgatttgttcaagatgaacgccggtattgtcaaaagcctggtaaccgctgttggaaagttcgcaccaaatgcgaggattttagtcatttcaaaccctgtaaacagtttggtccctattgctgtggaaactttgaagaaaatgggtaagttcaaacctggaaacgttatgggtgtgacgaaccttgacctggtacgtgcagaaacctttttggtagattatttgatgctaaaaaaccccaaaattggacaagaacaagacaaaactacaatgcacagaaaggtcactgttattgggggtcattcaggggaaaccattatcccaataatcaccgacaaatcgctggtatttcaacttgataagcagtacgagcacttcattcatagggtccagttcggaggtgatgaaattgtcaaagctaaacagggcgccggttccgccacgttgtccatggcgttcgcgggggccaagtttgctgaagaagttttgaggagcttccataatgagaaaccagaaacggagtcactttccgcattcgtttatttaccaggcttaaaaaacggtaagaaagcgcagcaattagttggcgacaactctattgagtatttttccttgccaattgttttgagaaatggtagcgtagtatccatcgataccagtgttctggaaaaactgtctccgagagaggaacaactcgttaatactgcggtcaaagagctacgcaagaatattgaaaaaggcaagagtttcatcctagactcttccaagctatga

SEQ ID NO: 638 - DNA, 1674 bp, Saccharomyces cerevisiae
atgcctatccccgttggaaatacgaagaacgattttgcagctttacaagcaaaactagatgcagatgctgccgaaattgagaaatggtggtctgactcacgttggagtaagactaagagaaattattcagccagagatattgctgttagacgcgggacattcccaccaatcgaatacccatcttcggtcatggccagaaaattattcaaggtattagagaagcatcacaatgagggtacagtctctaaaactttcggtgccctagatcctgtccagatttctcaaatggcaaaatacttagacacaatctatatttctggttggcagtgttcatcaactgcttccacctcaaatgaacctggtccagacttagctgattatccaatggacaccgttccaaacaaagtggaacatttgttcaaggcccaattgtttcacgacagaaaacaactagaggcacggtcaaaggctaaatctcaggaagaactcgatgagatgggtgccccaattgactacctaacaccaattgtcgctgatgcagacgcaggccacggcggtttaaccgcagtcttcaaattgaccaagatgttcattgagcgtggtgctgctgggatccacatggaagaccagacatctacaaataagaaatgtgggcatatggcaggaagatgtgttatacccgttcaggaacatgttaacagattggtgactattagaatgtgtgctgatatcatgcattctgacttaattgtcgttgctaggactgattcagaagcagccactttgattagctcaaccatcgataccagagatcattatttcattgtcggtgccaccaatccaaatatcgagccatttgccgaagttttaaatgatgccatcatgagtggtgcatcaggacaagaactagctgacattgaacaaaaatggtgtagagacgctggactcaagttattccatgaagccgtcattgatgaaattgaaagatcagccctgtcaaataagcaagaattgattaagaaattcacctctaaagtgggtccattgactgaaacatcccacagagaagccaagaagctcgctaaagaaattcttggccacgaaattttcttcgactgggagctaccacgcgtaagggaagggttgtaccgttacagaggtgggacgcaatgttctatcatgagggcccgtgcatttgctccatatgctgatttggtatggatggaatctaactacccagacttccaacaggccaaggagtttgcagaaggtgttaaagagaaattccctgaccaatggctagcttacaacttgtctccatcctttaactggccaaaagccatgtccgttgatgaacaacacaccttcatccaaaggctgggtgatctaggttacatctggcaatttatcacattggccggtttacacactaacgctttagctgtccataacttctctcgtgactttgccaaggatgggatgaaagcttatgcccagaatgttcagcagagggaaatggacgatggtgttgatgtgttgaaacatcaaaaatggtctggtgcggagtacatcgatgggttattgaagttagctcaaggtggtgttagcgcaacagctgctatgggaaccggtgtcacagaagatcaattcaaagaaaatggcgtaaagaaatag

SEQ ID NO: 639 - DNA, 1665 bp, Saccharomyces cerevisiae
atggttaaggtcagtttggataacgtcaaattactggtggatgttgataaggagcctttctttaaaccatctagtactacagtgggagatattcttaccaaggatgctctagagttcattgttcttttacacagaactttcaacaacaagagaaaacaattattggaaaacagacaagttgttcagaagaaattagactcgggctcctatcatctggatttcctgcctgaaactgcaaatattagaaatgatcccacttggcaaggtccaattttggcaccggggttaattaataggtcaacggaaatcacagggcctccattgagaaatatgctgatcaacgctttgaatgctcctgtgaacacctatatgactgattttgaagattcagcttcacctacttggaacaacatggtttacggtcaagttaatctctacgacgcgatcagaaatcaaatcgattttgacacaccaagaaaatcgtacaaattgaatggaaatgtggccaacttgcccactattatcgtgagaccccgtggttggcacatggtggaaaagcacctttatgtagatgatgaaccaatcagcgcttccatctttgattttggtttatatttctaccataatgccaaagaattaatcaaattgggcaaaggtccttacttctatttgccaaagatggagcaccacttggaagctaaactatggaacgacgtcttctgtgtagctcaagattacattgggatcccaaggggtacaatcagagctactgtgttgattgaaactttgcctgctgctttccaaatggaagagatcatctatcaattaagacaacattctagtgggttgaattgcggacgttgggactatattttctctacaatcaagagattaagaaatgatcctaatcacattttgcccaatagaaatcaagtgactatgacttccccattcatggatgcatacgtgaaaagattaatcaatacctgtcatcggaggggtgttcatgccatgggtggtatggctgcgcaaatccctatcaaagacgacccggcagccaatgaaaaggccatgactaaagtccgtaatgataagattagagagctgacaaatggacatgatgggtcatgggttgcacacccagcactggcccctatttgtaatgaagttttcattaatatgggaacaccaaaccaaatctatttcattcctgaaaacgttgtaacggctgctaatctgctggaaaccaaaattccaaatggtgagattactaccgagggaattgtacaaaacttggatatcgggttgcagtacatggaagcttggctcagaggctctggatgtgtgcccatcaacaacttgatggaagacgccgccactgctgaagtgtctcgttgtcaattgtatcaatgggtgaaacacggtgttactctaaaggacacgggagaaaaggtcaccccagaattaaccgaaaagattctaaaagaacaagtggaaagactgtctaaggcaagtccattgggtgacaagaacaaattcgcgctggccgctaagtatttcttgccagaaatcagaggcgagaaattcagtgaatttttgactacattgttgtacgacgaaattgtgtccactaaggcgacgcccactgatttgagcaaattgtga

SEQ ID NO: 640 - DNA, 1665 bp, Saccharomyces cerevisiae
atggtgaagataagcttggacaacactgctctatacgcagacatcgacacgactcctcaatttgaaccttccaaaactactgtagctgatattttaacaaaagatgccttagagttcattgttttgctgcatagaactttcaattcaacacggaaacagcttttagccaacagaagcaatttacaatcaaagttagactctggtgaataccgatttgatttcttgccggaaaccgaacaaatcaggaacgatcctacatggcaaggtgctatcccagcccctggtttgatcaacagatccagcgagattactgggccaccattgagaaatatgttagtcaacgctttgaatgctgaagtaacgacatatatgactgatttcgaggactcttcatctccaacttgggagaacatgatttacggacaagttaatctttatgatgccattagaaatcaaatcgatttcaagacaccaagaaaggagtacaggttgaaggatgacatttcaagactgcccactttaattgtcagacctcgtggctggcacatggtggagaagcacctttacatagatgatgaaccgattagtgcttccatcttcgattttggtttatatttttaccataacgctaaagagttagttaaaattggtaaaggaccttatttttacttaccaaagatggagcaccatatggaggtaaaactatggaatgacatattctgtgttgcacaagattttattggaatgccccgcggtaccattagggccactgttctgattgaaactttgccagcggccttccaaatggaggagattatctatcaaataagagaacattcaagcggtttgaactgtggtcgttgggactacatattttcgaccattaaaaaactgagaaacttgcctgaacacgttttgccaaatagggatctagtgactatgacttcaccttttatggatgcttatgtgaaaagattgatcaatacatgtcaccgtagaggggtccatgcgatgggtggtatggctgcccaaatccccataaaagatgatccaaaggctaatgaagctgcaatgaacaaagttcgtaatgacaaaattagagaaatgaagaatgggcatgatgggtcatgggtagcacacccagcattggcaccgatttgtaatgaagttttcagtaacatgggtacagcaaatcaaatatattttgtcccggatgtacatgttacatcatctgatttattgaatacgaagattcaagatgctcaagtcactactgagggaatcagagtaaacttggatattggcctacaatatatggaggcttggttaaggggatctggttgtgtcccaattaatcatttgatggaagatgccgctactgcggaagtatcacgttgtcaattgtaccagtgggttaaacatggtgttgtcttaagtgataccggtgacaaagtaactccagaattgaccgctaagatattaaatgaagagactgcaaaattggcttcagcaagtccgctgggtgaaaagaacaagtttgccttggcagccaagtattttttgcctgaagtcactggtaaaatctttagcgacttcttgaccactttattgtatgatgaaattattaagccaagtgccaaaccagttgacttaagtaaattatag

SEQ ID NO: 641 - DNA, 3537 bp, Saccharomyces cerevisiae
atgtcgcaaagaaaattcgccggcttgagagataacttcaatctcttgggtgaaaagaacaaaatattggtggctaatagaggagaaattccaatcagaatttttcgtaccgctcatgaactgtctatgcagacggtagctatatattctcatgaagatcgtctttcaacgcacaaacaaaaggctgacgaagcatacgtcataggtgaagtaggccaatatacccccgtcggcgcttatttggccattgacgaaatcatttccattgcccaaaaacaccaggtagatttcatccatccaggttatgggttcttgtctgaaaattcggaatttgccgacaaagtagtgaaggccggtatcacttggattggccctccagctgaagttattgactccgtgggtgataaggtctcagctagaaacctggcagcaaaagctaatgtgcccaccgttcctggtacaccaggtcctatagaaactgtagaggaagcacttgacttcgtcaatgaatacggctacccggtgatcattaaggccgcctttggtggtggtggtagaggtatgagagtcgttagagaaggtgacgacgtggcagatgcctttcaacgtgctacctccgaagcccgtactgccttcggtaatggtacctgctttgtggaaagattcttggacaagccaaagcatattgaagttcaattgttggccgataaccacggaaacgtggttcatcttttcgaaagagactgttccgtgcagagaagacaccaaaaggttgtcgaagtggccccagcaaagactttaccccgtgaagtccgtgacgccattttgacagatgcagttaaattggccaaagagtgtggctacagaaatgcgggtactgctgaattcttggttgataaccaaaatagacactatttcattgaaattaatccaagaatccaagtggaacataccatcacagaagaaattaccggtatagatattgtggcggctcagatccaaattgcggcaggtgcctctctaccccagctgggcctattccaggacaaaattacgactcgtggctttgccattcagtgccgtattaccacggaagaccctgctaagaacttccaaccagataccggtagaatagaagtgtaccgttctgcaggtggtaatggtgttagactggatggtggtaacgcctatgcaggaacaataatctcacctcattacgactcaatgctggtcaaatgctcatgctccggttccacctacgaaatcgttcgtagaaaaatgattcgtgcattaatcgagttcagaattagaggtgtcaagaccaacattcccttcctattgactcttttgaccaatccagtatttattgagggtacatactggacgacttttattgacgacaccccacaactgttccaaatggtttcatcacaaaacagagcccaaaaacttttacattacctcgccgacgtggcagtcaatggttcatctatcaagggtcaaattggcttgccaaaattaaaatcaaatccaagtgtcccccatttgcacgatgctcagggcaatgtcatcaacgttacaaagtctgcaccaccatccggatggaggcaagtgctactagaaaaggggccagctgaatttgccagacaagttagacagttcaatggtactttattgatggacaccacctggagagacgctcatcaatctctacttgcaacaagagtcagaacccacgatttggctacaatcgctccaacaaccgcacatgcccttgcaggtcgtttcgccttagaatgttggggtggtgccacattcgatgttgcaatgagatttttgcatgaggatccatgggaacgtttgagaaaattaagatctctggtgcctaatattccattccaaatgttattgcgtggtgccaatggtgtggcttattcttcattgcctgacaatgctattgaccatttcgtcaagcaagccaaggataatggtgttgatatatttagagtctttgatgccttaaatgacttggaacaattgaaggtcggtgtagatgctgtgaagaaggcaggtggtgttgtagaagccactgtttgtttctctggggatatgcttcagccaggcaagaaatacaatttggattactacttggaaattgctgaaaaaattgtccaaatgggcactcatatcctgggtatcaaagatatggcaggtaccatgaagccagcagctgccaaactactgattggatctttgagggctaagtaccctgatctcccaatacatgttcacactcacgattctgcaggtactgctgttgcatcaatgactgcgtgtgctctggcgggcgccgatgtcgttgatgttgccatcaactcaatgtctggtttaacttcacaaccatcaatcaatgctctgttggcttcattagaaggtaatattgacactggtattaacgttgagcatgtccgtgaactagatgcatattgggcagagatgagattgttatactcttgtttcgaggctgacttgaagggcccagatccagaagtttatcaacatgaaatcccaggtggtcaattgacaaacttgttgtttcaagcccaacaattgggtcttggagaacaatgggccgaaacaaaaagagcttacagagaagccaattatttattgggtgatattgtcaaagttaccccaacttcgaaggtcgttggtgatctggcacaatttatggtctccaataaattaacttccgatgatgtgagacgcctggctaattctttggatttccctgactctgttatggatttcttcgaaggcttaatcggccaaccatatggtgggttcccagaaccatttagatcagacgttttaaggaacaagagaagaaagttgacttgtcgtccaggcctggaactagagccatttgatctcgaaaaaattagagaagacttgcagaatagatttggtgatgttgatgagtgcgacgttgcttcttataacatgtacccaagagtttatgaagacttccaaaagatgagagaaacgtatggtgatttatctgtattgccaacaagaagctttttgtctccactagagactgacgaagaaattgaagttgtaatcgaacaaggtaaaacgctaattatcaagctacaggctgtgggtgatttgaacaaaaagaccggtgaaagagaagtttactttgatttgaatggtgaaatgagaaaaattcgtgttgctgacagatcacaaaaagtggaaactgttactaaatccaaagcagacatgcatgatccattacacattggtgcaccaatggcaggtgtcattgttgaagttaaagttcataaaggatcactaataaagaagggccaacctgtagccgtattaagcgccatgaaaatggaaatgattatatcttctccatccgatggacaagttaaagaagtgtttgtctctgatggtgaaaatgtggactcttctgatttattagttctattagaagaccaagttcctgttgaaactaaggcatga

SEQ ID NO: 642 - DNA, 3543 bp, Saccharomyces cerevisiae
atgagcagtagcaagaaattggccggtcttagggacaatttcagtttgctcggcgaaaagaataagatcttggtcgccaatagaggtgaaattccgattagaatttttagatctgctcatgagctgtctatgagaaccatcgccatatactcccatgaggaccgtctttcaatgcacaggttgaaggcggacgaagcgtatgttatcggggaggagggccagtatacacctgtgggtgcttacttggcaatggacgagatcatcgaaattgcaaagaagcataaggtggatttcatccatccaggttatgggttcttgtctgaaaattcggaatttgccgacaaagtagtgaaggccggtatcacttggatcggccctccagctgaagttattgactctgtgggtgacaaagtctctgccagacacttggcagcaagagctaacgttcctaccgttcccggtactccaggacctatcgaaactgtgcaagaggcacttgacttcgttaatgaatacggctacccggtgatcattaaggccgcctttggtggtggtggtagaggtatgagagtcgttagagaaggtgacgacgtggcagatgcctttcaacgtgctacctccgaagcccgtactgccttcggtaatggtacctgctttgtggaaagattcttggacaagccaaagcatattgaagttcaattgttggctgataaccacggaaacgtggttcatcttttcgaaagagactgttctgtgcaaagaagacaccaaaaagttgtcgaagtcgctccagcaaagactttgccccgtgaagttcgtgacgctattttgacagatgctgttaaattagctaaggtatgtggttacagaaacgcaggtaccgccgaattcttggttgacaaccaaaacagacactatttcattgaaattaatccaagaattcaagtggagcataccatcactgaagaaatcaccggtattgacattgtttctgcccaaatccagattgccgcaggtgccactttgactcaactaggtctattacaggataaaatcaccacccgtgggttttccatccaatgtcgtattaccactgaagatccctctaagaatttccaaccggataccggtcgcctggaggtctatcgttctgccggtggtaatggtgtgagattggacggtggtaacgcttatgcaggtgctactatctcgcctcactacgactcaatgctggtcaaatgttcatgctctggttctacttatgaaatcgtccgtaggaagatgattcgtgccctgatcgaattcagaatcagaggtgttaagaccaacattcccttcctattgactcttttgaccaatccagtttttattgagggtacatactggacgacttttattgacgacaccccacaactgttccaaatggtatcgtcacaaaacagagcgcaaaaactgttacactatttggcagacttggcagttaacggttcttctattaagggtcaaattggcttgccaaaactaaaatcaaatccaagtgtcccccatttgcacgatgctcagggcaatgtcatcaacgttacaaagtctgcaccaccatccggatggagacaagtgctactggaaaagggaccatctgaatttgccaagcaagtcagacagttcaatggtactctactgatggacaccacctggagagacgctcatcaatctctacttgcaacaagagtcagaacccacgatttggctacaatcgctccaacaaccgcacatgcccttgcaggtgctttcgctttagaatgttggggtggtgctacattcgacgttgcaatgagattcttgcatgaggatccatgggaacgtctgagaaaattaagatctctggtgcctaatattccattccaaatgttattacgtggtgccaacggtgtggcttactcttcattacctgacaatgctattgaccattttgtcaagcaagccaaggataatggtgttgatatatttagagtttttgatgccttgaatgatttagaacaattaaaagttggtgtgaatgctgtcaagaaggccggtggtgttgtcgaagctactgtttgttactctggtgacatgcttcagccaggtaagaaatacaacttagactactacctagaagttgttgaaaaaatagttcaaatgggtacacatatcttgggtattaaggatatggcaggtactatgaaaccggccgctgccaaattattaattggctccctaagaaccagatatccggatttaccaattcatgttcacagtcatgactccgcaggtactgctgttgcgtctatgactgcatgtgccctagcaggtgctgatgttgtcgatgtagctatcaattcaatgtcgggcttaacttcccaaccatcaattaatgcactgttggcttcattagaaggtaacattgatactgggattaacgttgagcatgttcgtgaattagatgcatactgggccgaaatgagactgttgtattcttgtttcgaggccgacttgaagggaccagatccagaagtttaccaacatgaaatcccaggtggtcaattgactaacttgttattccaagctcaacaactgggtcttggtgaacaatgggctgaaactaaaagagcttacagagaagccaattacctactgggagatattgttaaagttaccccaacttctaaggttgtcggtgatttagctcaattcatggtttctaacaaactgacttccgacgatattagacgtttagctaattctttggactttcctgactctgttatggacttttttgaaggtttaattggtcaaccatacggtgggttcccagaaccattaagatctgatgtattgagaaacaagagaagaaagttgacgtgccgtccaggtttagaattagaaccatttgatctcgaaaaaattagagaagacttgcagaacagattcggtgatattgatgaatgcgatgttgcttcttacaatatgtatccaagggtctatgaagatttccaaaagatcagagaaacatacggtgatttatcagttctaccaaccaaaaatttcctagcaccagcagaacctgatgaagaaatcgaagtcaccatcgaacaaggtaagactttgattatcaaattgcaagctgttggtgacttaaataagaaaactgggcaaagagaagtgtattttgaattgaacggtgaattaagaaagatcagagttgcagacaagtcacaaaacatacaatctgttgctaaaccaaaggctgatgtccacgatactcaccaaatcggtgcaccaatggctggtgttatcatagaagttaaagtacataaagggtctttggtgaaaaagggcgaatcgattgctgttttgagtgccatgaaaatggaaatggttgtctcttcaccagcagatggtcaagttaaagacgttttcattaaggatggtgaaagtgttgacgcatcagatttgttggttgtcctagaagaagaaaccctacccccatcccaaaaaaagtaa

SEQ ID NO: 643 - DNA, 1284 bp, Saccharomyces cerevisiae
atgcgtaagtgtaaaatttttgttggtaactctcacccagagttgggtaatatggtttgccaaagattaggtatcgaaccagctccatgtacattaaaaaaatttgcaaatggtgaaacgtcagttcaaatcggtgtatctgttcgtgacgaagatgtgtatgtcattcaatctggttctccatccataaatgatgacattatggaactgttgattttagtttctgcctgtaggggcggatctgctaggaaaattacagcagtcattcctcaatttccttactctaaacaatgtaaaatgaagagacacagaggcgctattactgcaaggatgttggccaatctgttggtcatggctggcgctgatcatgttgtgtctatggaccttcatgcttctcaaatgcaggggtttttcaccaaaccagtcgataacctatacgggggccctagtttagcgaaatggattagagaaaatgttgaagactatgaagatgcagtagttgtctctaagaatccaggtggtactaaaagagttacagccctggcggattctttgaagatcaactttgctatgatccatactgatcgtcgtcgttctaaggatctgtattctcaaaacaaggatttgcaacaactaaagttgagaaagcaatcaatgttgaggaaaaatagaccgatcatcagacaaggtgaccatccaaatgaggaggaaaacattattttaagtaacggtattcaaactgctaggatccgtaacggccacgttatcggtgacgatgaggcagacgatgatgaagacgctatcttagaatctgacagcgaattgcattctattgatggcttagactcgcatggcttgggcggtacatatgatgctgtcgactccgaagacgaagaggaaatcccagttctctatagggaacaactgattacattggtcggaaacgtccgtggtcgctctgccatcattctagatgatatgattgatagacctgggtcatttattagcgctgctgaacatttggtgcaaaattgtggtgccaaaaaggtttatgttgttgctactcacggtatattcactggagactgtttggaagaacttgaaaagtccgatgccattgacacaattgtggtcacaaatacatatccgatttctggcgaacgcatagctgggtccaagaaattggttactatcgatgtttctccaattttcgcagaatgtatccgtcgtgatcattatggtgagagtatttccgttttatttgactctttggcagctctgtaa

SEQ ID NO: 644 - DNA, 957 bp, Saccharomyces cerevisiae
atgtctacaaacagtattaagttgttagctggtaactcacatcctgggcttgctgagcttatttcccaaaggcttggtgtaccgttatctaaagtgggggtatatcagtattcaaataaagagacgtctgttacaataggggaaagcattcgtgatgaagacgtatatatcatccaaactggttacggggaacatgaaatcaacgatttcttaatggaattacttatcttaattcacgcttgtaagacggcatcagtcagaagaattacggcagtaataccaaatttcccttatgctagacaagataagaaggataaatcgcgggcgcccatcactgcgaagctgattgccaatcttttggaaactgcgggttgtgatcatgttattactatggatctccatgcttcacaaattcaagggttttttcatatcccggttgataatttatacggtgaaccaagtgtgttgaattacataaggaccaaaacagatttcaataatgcgatactggtatcgcctgatgctggtggtgcgaaaagggtggcttctttagcggacaagctggatatgaattttgccttgattcataaggagaggcaaaaagctaatgaagtttcgcgaatgctgcttgtcggtgatgttgctggtaagtcatgcttgttgattgacgatatggctgacacgtgtggtacgctggtgaaagcctgtgacacattaatggatcacggtgctaaggaggttatcgctattgtcacacatggtatattttctggctcagctagggagaagttaataaatagtaggttatcaagaattgtttgcaccaacacggtacctgttgatttggatttggacattgtcgatcaggtggatatcagccctacgattgcagaagctatcagaagattgcataatggagaatcagtctcatatttatttacacatgcgcctgtttaa

SEQ ID NO: 645 - DNA, 963 bp, Saccharomyces cerevisiae
atgccaacaaattccatcaaattattagcaccagatgtccaccgaggtttagctgaacttgttgccaaaaggctaggtctacagttaacaagcagcaaactaaagagagatccaaccggtgaggtttccttttctattggagaatctgttagggaccaagatatctttatcatcacgcaaattggctctggtgtcgtgaacgatcgtgttctagaactactgatcatgatcaatgcttcgaagactgcgtctgcaagaagaatcactgctattattccaaatttcccatatgcaagacaagatagaaaggataagtctcgtgctcctattaccgctaaattgatggccgatatgttaacaacagccgggtgtgatcatgttattactatggatttgcatgcttcccaaattcaagggttcttcgacgtcccagtagataatttatatgcagaaccaagcgtagttaggtatatcaaggaaaatgtcaactatatggattcaataataatttcgccagatgctggtggggcaaaacgtgctgccactttggctgatcgtttggatctaaattttgcattgatccataaggaaagagctcgtgccaatgaggtttctcgtatggttcttgttggggatgttactgataagatttgtatcattgttgatgatatggccgatacttgtggtactttagctaaggctgctgaaattcttttggagaatagagctaaatctgttattgctattgtcacgcacggtgttttatcaggcagagctattgaaaatattaacaattctaaactggatagagttgtttgcacaaatactgttccatttgaagaaaaaatcaagaagtgcccaaaactggcagtcattgacatcagtagtgtgctggctgaaagtattcgtcgtttgcataatggtgaaagtatttcttatttatttaagaattatcccttataa

SEQ ID NO: 646 - DNA, 984 bp, Saccharomyces cerevisiae
atgaattcagagtctcgagaagatatggctataaatagtatcaaattgctagcgggaaactcccatcctgatttggctgaacaaatatcgaaaaagttaggtattccactttccaaagttggtgtgtaccagtattctaataaagaaacctctgtcaccataggtgagagccttcgcgacgaagatgtgtatattatccaaactggaataggtgaacaagaaattaatgatttcttgatggaattattaattttaattcatgcttgccaaattgcatctgcaagaaagatcactactgtaatacccaattttccatatgcaagacaagacaagaaagataaatcccgggcgcccattaccgcaaagttggttgccaatttattgcaaactgctggtgctgatcatgtcatcacaatggatctccatgcctcccaaattcaagggtttttccatatcccggttgacaacctatatgcagaaccaagtgttttaaattatattagagcccggaaaacagatttcgacaatgctattttggtgtcgcctgatgcaggtggtgctaagagagtagctgctttggctgacaagttagatttaaattttgctttgattcacaaagagaggcaaaaagctaacgaggtttcaaaaatggtgcttgttggtgatgttaccaataaatcatgtttattagttgatgatatggcggatacttgtggtacgttggtaaaagcttgtgatacgttgatggagcatggtgccaaagaagttatagctattgttacacacggtattttctccggttcagcaagagaaaagctaagaaatagtagattgtctagaattgtttgcacaaataccgttccggtagatttggatttacctattgctgaccagatcgatattagtcccacgttcgctgaagctataagaagactacacaatggtgaatccgtgtcatatttgttcacccatgctccagtatag

SEQ ID NO: 647 - DNA, 1491 bp, Saccharomyces cerevisiae
atgtcaatgagtaatattgttgtttttggaggggactcgcaccccgagttagttactaagatctgtgaaaatttggacattcacccatcgaaagtagaattagggaagttttctaatggggaaacgaacattgctcttcgcgaatctgttcgtgaaaaggatgtatatatcatccagagtggttgtggccaggtgaacgacacgttcatgcagttgctgattttaatcagtgcctgcaagtccgcttctgcctcgagggttacagccgtaatgccatatctctgctactcgagacagccagatattccatatactgccaagggtgctcccataatttccaagcctaaagaaaactatacttttgaatcgcatccaggcacacccgtgtcatcttctttaatgacgcaaagaccaggtgctgagagctcgttgaagagtttggatagtgcaatacgatcaactatcaacttagaaaatcctcaacctatcagaacaccaaacagcagtgctacggcgaataacaatttcgacatcaagaagacgctttctttttcaagaattcctatgattcccggtggtaagttacaaaatacaagcaatagcacggacgctggtgaattgttcaacgctcaaaatgcaggctataagctatgggtagtacaagccggtactttgattgctcatttgttgagtgctgcaggtgctgaccatgtgatcacaatggatttgcacgatccacagttccctgggttttttgacattccagtggataatctctactgtaaacccattgcacaaaactacatccagcatcgcattccagattatcaggatgctgtgatcgtttctccagatgctggtggtgcaaagagagctacggctattgcagacgccttggaattgtccttcgccctaattcataaagaaagaagatctcagttattgaagggccctccagatgcgacgttaacctctggtggttcgttaccagtatctccaaggccattagttactactttggtttcctcccaaaatactacttcttcaggtgccactggggttgcggcccttgaaatgaagaaaacaacttcaacatcttccacctcgtcgcaatcttctaattcgtccaagttcgttcaaactaccatgcttgttggcgatgttagaaacaaggtgtgtattatagtcgacgacttggtggatacttcatacactattacaagagctgcgaaattgttgaaggatcaaggatctaccaaagtttatgccttaataacgcacggtgttttttccggtgatgcgctagaaagaatcggccaaagtagtatagataagttgatcatttctaacacggttcctcaagatagaacactacagtacctaggtaaggacagagtggatgttattgatgtctcctgcataatcggtgaagcaattagaagaatccataacggtgaatccatttctatgttgttcgagcatggatggtag

SEQ ID NO: 648 - DNA, 1323 bp, Saccharomyces cerevisiae
atgtctgaaaataacgaattccagagtgtcaccgaatcgacgactgctccaaccactagtaacccatatggcccaaatcctgcggattatctatccaatgttaagaatttccagttgattgattcaacactaagagagggtgaacaatttgccaacgcattcttcgatactgaaaaaaagattgaaattgctagagccttggatgatttcggtgtggactacatcgagttaacctctcccgtagcatccgaacaatcaagaaaggactgtgaagctatatgtaaactaggtttaaaggccaagatccttacacacattcgttgtcacatggacgatgccagagtcgccgtagagactggtgtcgacggtgtcgatgttgttatcggcacctccaaatttttaagacaatattcccacggtaaggatatgaactacatcgccaagagtgctgttgaagtcattgaatttgtcaaatccaaaggtattgaaatcagattttcctctgaagattccttcagaagtgatctcgttgatcttttgaacatttataaaaccgttgacaagatcggtgtaaatagagtcggtattgccgacacagttggatgtgccaacccaagacaagtatatgaactgatcagaactttgaagagtgttgtctcatgtgacatcgaatgccatttccacaatgataccggttgtgccattgcaaacgcctacactgctttggaaggtggtgccagattgattgacgtcagtgtactgggtattggtgaaagaaacggtatcactcctctaggtgggctcatggcaagaatgattgttgccgcaccagactatgtcagatctaaatacaagctgcacaagatcagagacatcgaaaacctggtcgctgatgctgtggaagttaacattccattcaacaaccctatcaccgggttctgtgcattcacacataaagcaggtatccatgccaaggccattttggctaacccatctacctacgaaatcttggaccctcacgatttcggtatgaagagatatatccacttcgccaacagactaactggttggaatgcaatcaaatcaagagtcgaccaattgaacttgaatttgacggatgatcaaatcaaggaagttactgctaagattaagaagctgggtgatgtcagaccgctaaatattgatgatgtagactccattatcaaggacttccatgcagaattgagcaccccacttttaaaaccagtaaataagggtacagatgacgacaatatcgatatttccaatgggcatgtttctaaaaaggcaaaggtcaccaaatag

SEQ ID NO: 649 - DNA, 1287 bp, Saccharomyces cerevisiae
atgactgctgctaaaccaaatccatatgctgccaaaccgggcgactatctttctaatgtaaataatttccagttaatcgattcgacgctgagagaaggtgaacaatttgccaacgcattcttcgatactgaaaaaaagatcgaaattgctagagccttggacgatttcggtgtggactacatcgagttaacctcaccagtagcatctgaacaatcaagaaaggactgtgaagctatatgtaaactaggtttaaaggccaagatccttacacacattcgttgtcatatggatgacgccaaagtcgccgtagagactggtgtcgacggtgtcgatgtcgttatcggcacctccaaatttttaagacaatattcccacggtaaggatatgaactacatcgccaagagtgctgttgaagtcattgaatttgtcaaatccaaaggtattgaaatcagattttcctctgaagattccttcagaagtgatctcgttgatcttttgaacatttataaaaccgttgacaagatcggtgtaaatagagtcggtattgccgacacagttggatgtgccaacccaagacaagtatatgaactgatcagaactttgaagagtgttgtttcatgtgacatcgaatgccatttccacaacgatactggttgtgccattgcaaacgcctacactgctttggaaggtggtgccagattgattgacgtcagtgtactgggtattggtgaaagaaacggtatcactcctctaggtgggctcatggcaagaatgattgttgccgcaccagactatgtcaagtccaaatacaagttgcacaagatcagagacattgaaaacctggtcgctgatgctgtggaagttaacattccattcaacaaccctatcaccgggttctgtgcattcacacataaagcaggtatccatgccaaggccattttggctaacccatctacctacgaaatcttggaccctcacgatttcggtatgaagaggtatatccacttcgccaacagactaactggctggaacgccatcaaagccagagtcgaccagttgaacttgaacttgacggatgaccaaatcaaggaagttactgctaagattaagaagctgggtgatgtcagatcgctgaatatcgatgatgttgactctatcatcaagaacttccacgcagaggtcagcactcctcaagtactatctgcaaaaaagaacaagaagaatgacagcgatgtaccggaactggccaccatccccgccgccaagcggactaagccatccgcctaa

SEQ ID NO: 650 - DNA, 1365 bp, Saccharomyces cerevisiae
atgtcagagccagaatttcaacaagcttacgaagaagttgtctcctctttggaagactctactcttttcgaacaacacccagaatacagaaaggttttgccaattgtttctgttccagaaagaatcatacaattcagagtcacctgggaaaatgacaagggtgaacaagaagttgctcaaggttacagagtgcaatataactccgccaagggtccatacaagggtggtctacgtttccatccttccgtgaacttgtctatcttgaaattcttgggtttcgaacaaatcttcaagaactccttgaccggcctagacatgggtggtggtaaaggtggtctatgtgtggacttgaagggaagatctaataacgaaatcagaagaatctgttatgctttcatgagagaattgagcagacacattggtcaagacactgacgtgccagctggtgatatcggtgttggtggtcgtgaaattggttacctgttcggtgcttacagatcatacaagaactcctgggaaggtgtcttaaccggtaagggtttgaactggggtggttctttgatcagaccagaagccactggttacggtttagtttactatactcaagctatgatcgactatgccacaaacggtaaggaatctttcgaaggtaagcgcgtcaccatctctggtagtggtaacgttgctcaatacgctgccttgaaggttattgagctaggtggtactgtcgtttccctatctgactccaagggttgtatcatctctgaaactggtatcacctccgaacaagtcgctgatatttccagtgctaaggtcaacttcaagtccttggaacaaatcgtcaacgaatactctactttctccgaaaacaaagtgcaatacattgctggtgctcgtccatggacccacgtccaaaaggtcgacattgctttgccatgtgccacccaaaatgaagtcagcggtgaagaagccaaggccttggttgctcaaggtgtcaagtttattgccgaaggttccaacatgggttccactccagaagctattgccgtctttgaaactgctcgttccaccgccactggaccaagcgaagctgtttggtacggtccaccaaaggctgctaacttgggtggtgttgctgtttctggtttagaaatggcacaaaactctcaaagaatcacatggactagcgaaagagttgaccaagagttgaagagaattatgatcaactgtttcaatgaatgtatcgactatgccaagaagtacactaaggacggtaaggtcttgccatctttggtcaaaggtgctaatatcgcaagtttcatcaaggtctctgatgctatgtttgaccaaggtgatgtattttaa

SEQ ID NO: 651 - DNA, 1374 bp, Saccharomyces cerevisiae
atgacaagcgaaccagagtttcagcaggcttacgatgagatcgtttcttctgtggaggattccaaaatttttgaaaaattcccacagtataaaaaagtgttacctattgtttctgtcccggagaggatcattcaattcagggtcacgtgggaaaatgataatggcgagcaagaagtggctcaaggatacagggtgcagttcaattcagccaagggcccttacaagggtggcctacgcttccacccatcagtgaacctgtctatcctaaaatttttgggttttgaacagatcttcaagaatgcgctcactgggctagatatgggcggtggtaagggtggcctgtgtgtggacttgaaaggcaagtctgacaacgagatcagaaggatttgttatgcgttcatgagagaactgagcaggcatattggtaaggacacagacgtgcccgcaggagatattggtgtcggtggccgtgaaattggctacctattcggcgcttacagatcatacaagaactcctgggaaggtgtgttgactggtaagggtttaaactggggtggctcacttatcaggccggaggccaccgggttcggcttagtttactatacgcaagcaatgatcgattatgcaacaaacggcaaggagtcgtttgagggcaaacgtgtgacaatctccggaagtggcaatgttgcgcaatatgcagctttgaaagtgatcgagctgggtggtattgtggtgtctttatccgattcgaaggggtgcatcatctctgagacgggcattacttctgagcaaattcacgatatcgcttccgccaagatccgtttcaagtcgttagaggaaatcgttgatgaatactctactttcagcgaaagtaagatgaagtacgttgcaggagcacgcccatggacgcatgtgagcaacgtcgacattgccttgccctgtgccacccaaaacgaggtcagtggtgacgaagccaaggccctagtggcatctggcgttaagttcgttgccgaaggtgctaacatgggttctacacccgaggctatttctgttttcgaaacagcgcgtagcactgcaaccaatgcaaaggatgcagtttggtttgggccaccaaaggcagctaacctgggcggcgtggcagtatccggtctggaaatggctcagaattctcaaaaagtaacttggactgccgagcgggtcgatcaagaactaaagaagataatgatcaactgcttcaacgactgcatacaggccgcacaagagtactctacggaaaaaaatacaaacaccttgccatcattggtcaagggggccaacattgccagcttcgtcatggtggctgacgcaatgcttgaccagggagacgttttttag

SEQ ID NO: 652 - DNA, 1494 bp, Saccharomyces cerevisiae
atgactttgagtaagtattctaaaccaactctaaacgaccctaatttattcagagaatctggttatattgacggaaaatgggttaagggcactgacgaagtttttgaggtggtagaccctgcttccggcgaaatcatagcaagagttcccgaacaaccagtctccgtggttgaggaagcgattgatgttgcctatgaaactttcaagacgtacaagaatacaacaccaagagagagggcaaagtggctcagaaacatgtataacttaatgcttgaaaatttggatgatctggcaaccatcattactttagaaaatggtaaagctctaggggaagctaaaggagaaatcaaatacgcggcttcgtattttgagtggtacgccgaggaagcaccccgtttatatggtgctactattcaacccttgaaccctcacaacagagtattcacaattaggcaacctgttggtgtatgcggtataatttgtccatggaattttccgagcgccatgatcacgagaaaggccgccgctgctttagctgtgggctgcacagtagtcatcaagccagactctcaaacgccgctatctgctttagcaatggcatatttggctgaaaaggcaggctttcccaagggttcgtttaatgttattctttcacatgccaacacaccaaagcttggtaaaacattatgtgaatcaccaaaagtcaagaaagttacttttactggttctacaaacgtcggtaaaatcttgatgaaacaatcttcttctactttgaagaaactgtcttttgagctgggtggtaacgcccctttcatagtctttgaggatgccgatttggatcaagccttggaacaagccatggcttgtaaatttaggggtttgggtcaaacatgtgtgtgcgcaaatagactttacgttcactcatccataattgataaatttgcgaaattactcgcggagagggtcaaaaaattcgtaattggccatggtttggacccaaaaactacacatggttgtgtcattaactccagcgctattgaaaaagttgaaagacataaacaggatgccattgataagggagcaaaagttgtgcttgaaggtggacgtttaactgagttaggtcctaacttttatgctccagtaattttgtcacacgttccctcaacagctattgtttccaaggaggagacttttggtccattatgtccaatcttttcttttgatactatggaagaagttgtcggatatgctaatgatactgagtttggtttagcagcatatgtcttttctaaaaatgtcaacactttatacactgtgtctgaagctttggaaactggtatggtttcatgtaatacaggtgttttttcggattgttctataccatttggtggtgttaaagagtcaggatttggaagagaaggttcgctatatggtattgaagattacactgttttgaagaccatcacaattgggaatttgccaaacagcatttaa

SEQ ID NO: 653 - DNA, 1257 bp, Saccharomyces cerevisiae
atgtctgccactctgttcaataacatcgaattgctgccccctgatgccctttttggtattaagcaaaggtacgggcaagatcaacgtgctaccaaggtcgacttgggtatcggggcctacagagacgacaacggtaaaccatgggtcttgccaagtgttaaagccgccgaaaagctaattcataacgacagctcctacaaccatgaatacctcggtattaccggtctgccaagtttgacatctaacgccgccaagatcatcttcggtacgcaatccgatgcctttcaggaagacagagtaatctcagtacaatcactgtctggtacgggtgctcttcatatatctgcgaagtttttttcaaaattcttcccagataaactggtctatttgtctaagcctacttgggccaaccacatggccatttttgagaatcaaggcttgaaaacggcgacttacccttactgggccaacgaaactaagtctttggacctaaacggctttctaaatgctattcaaaaagctccagagggctccattttcgttctgcactcttgcgcccataacccaactggtctggaccctactagtgaacaatgggttcaaatcgttgatgctatcgcctcaaagaaccacatcgccttatttgacaccgcctaccaagggtttgccactggagatttggacaaggatgcctatgctgtgcgtctaggtgtggagaagctttcaacggtctctcccgtctttgtctgtcagtcctttgccaagaacgccggtatgtacggtgagcgtgtaggttgtttccatctagcacttacaaaacaagctcaaaacaaaactataaagcctgctgttacatctcaattggccaaaatcattcgtagtgaagtgtccaacccacccgcctacggcgctaagattgtcgctaaactgttggaaacgccagaattaacggaacagtggcacaaggatatggttaccatgtcctccagaattacgaaaatgaggcacgcattaagagaccatttagtcaagttgggcactcctggcaactgggatcatatagtaaatcaatgcgggatgttctcctttacaggattgactcctcaaatggttaaacgacttgaagaaacccacgcagtttacttggttgcctcaggtagagcttctattgctggattgaatcaaggaaacgtggaatacgtggctaaagccattgatgaagtggtgcgcttctatactattgaagctaaattgtaa

SEQ ID NO: 654 - DNA, 1356 bp, Saccharomyces cerevisiae
atgttgaggacgaggcttactaattgcagtctatggaggccctactacacgtcatcgcttagtagagtaccaagagcacctccagataaagtcttggggttatctgaacacttcaaaaaggtaaaaaatgttaacaaaattgacctgaccgtaggaatatataaagatggttggggcaaagtgacgacgtttccctccgttgcaaaagctcaaaaattgattgaatctcatttagagttgaataagaatctttcatatttaccaataacaggttccaaagaatttcaggaaaacgttatgaaatttttgttcaaggaatcatgtccgcagtttgggccattttatttagcccatgatagaatcagctttgttcagactttgagtggtacaggcgccctagctgtagcagctaaattcttggcattatttatttcaagagatatttggatacctgacccatcatgggcaaatcataagaacatttttcagaacaatggttttgaaaatatttaccggtattcctattataaggacggtcagatagacatcgacggatggattgagcaattgaaaacctttgcatataacaaccagcaagaaaacaataagaacccaccttgcataatcttgcatgcgtgttgtcacaaccctacaggtctcgacccaactaaagagcaatgggaaaagattatagatactatatatgagctaaaaatggtacccattgttgatatggcttatcagggtttagagtctggtaacttactaaaggacgcatatttattgaggctatgtctcaatgtaaataaatatccaaattggagtaacggtatctttctttgtcaatcttttgccaagaacatgggcctttatggtgaacgagttggttccttaagcgttatcacgccggcaactgcgaacaatggaaagttcaaccctctacaacagaaaaactcattgcagcaaaatattgactcccaattaaaaaagattgtcagaggtatgtattcttctccaccaggatacggttctcgtgtggtaaatgtagtattatcagatttcaaattgaaacagcaatggttcaaggatgttgatttcatggttcagagattgcatcacgtcagacaggagatgtttgaccgtctagggtggccggatcttgtaaatttcgcacaacagcacggtatgttttactatacaaggtttagtccaaagcaagtcgaaatattgagaaacaattacttcgtctatttaacaggtgatggtagattgtcgcttagcggagtcaatgattcgaacgttgattacttatgtgaatctcttgaagcagtctcgaaaatggacaaactcgcataa

SEQ ID NO: 655 - DNA, 1113 bp, Saccharomyces cerevisiae
atgttcattaaaaacgatcacgccggtgacaggaaacgcttggaagactggagaatcaaaggttatgatccattaacccctccagatctgcttcaacatgaatttccaatttcagccaaaggtgaggaaaacattatcaaggcaagagactccgtctgtgatattttgaatggtaaagatgatcgtttagttatcgtgatcgggccatgttccctacatgaccccaaagccgcttacgattacgctgacagattggctaaaatttcagaaaagttgtcaaaagacttattgattattatgagagcgtatttagaaaaaccaaggactactgttggctggaaagggttgattaacgaccctgatatgaataactcttttcaaatcaataaaggtctacggatttcgagagaaatgttcataaaactggttgaaaaattacccattgctggtgagatgttggataccatttctccgcagtttttgagtgattgtttctccttgggtgccatcggcgccagaactactgaatcccaactgcacagagaattagcatccggtctatctttccctattggatttaagaacggtactgatggtggtttgcaagtcgccatcgacgctatgagagccgctgcacatgaacattacttcctttctgtcacaaagccaggtgtcactgctatcgtgggcactgaaggtaacaaggataccttcctgatcttgagaggtggtaagaacggtactaactttgacaaagaaagtgttcaaaatactaagaaacagttagaaaaggccggtttgactgatgattcccagaaaagaattatgatcgattgttcccacggcaacagtaataaagatttcaagaaccaaccaaaggttgccaaatgtatttatgaccagctgacggagggtgagaatagtctctgtggtgttatgattgagtccaacataaatgaaggtagacaagatattcccaaagaaggtggcagagagggattgaagtatggttgttctgttacggatgcttgtattggctgggagtccaccgaacaggtattggagctattggcagaaggtgttagaaacagaagaaaggccttgaaaaaatag

SEQ ID NO: 656 - DNA, 1113 bp, Saccharomyces cerevisiae
atgagtgaatctccaatgttcgctgccaacggcatgccaaaggtaaatcaaggtgctgaagaagatgtcagaattttaggttacgacccattagcttctccagctctccttcaagtgcaaatcccagccacaccaacttctttggaaactgccaagagaggtagaagagaagctatagatattattaccggtaaagacgacagagttcttgtcattgtcggtccttgttccatccatgatctagaagccgctcaagaatacgctttgagattaaagaaattgtcagatgaattaaaaggtgatttatccatcattatgagagcatacttggagaagccaagaacaaccgtcggctggaaaggtctaattaatgaccctgatgttaacaacactttcaacatcaacaagggtttgcaatccgctagacaattgtttgtcaacttgacaaatatcggtttgccaattggttctgaaatgcttgataccatttctcctcaatacttggctgatttggtctccttcggtgccattggtgccagaaccaccgaatctcaactgcacagagaattggcctccggtttgtctttcccagttggtttcaagaacggtaccgatggtaccttaaatgttgctgtggatgcttgtcaagccgctgctcattctcaccatttcatgggtgttactaagcatggtgttgctgctatcaccactactaagggtaacgaacactgcttcgttattctaagaggtggtaaaaagggtaccaactacgacgctaagtccgttgcagaagctaaggctcaattgcctgccggttccaacggtctaatgattgactactctcacggtaactccaataaggatttcagaaaccaaccaaaggtcaatgacgttgtttgtgagcaaatcgctaacggtgaaaacgccattaccggtgtcatgattgaatcaaacatcaacgaaggtaaccaaggcatcccagccgaaggtaaagccggcttgaaatatggtgtttccatcactgatgcttgtataggttgggaaactactgaagacgtcttgaggaaattggctgctgctgtcagacaaagaagagaagttaacaagaaatag

SEQ ID NO: 657 - DNA, 4767 bp, Saccharomyces cerevisiae
atggtgcagttagccaaagtcccaattctaggaaatgatattatccacgttgggtataacattcatgaccatttggttgaaaccataattaaacattgtccttcttcgacatacgttatttgcaatgatacgaacttgagtaaagttccatactaccagcaattagtcctggaattcaaggcttctttgccagaaggctctcgtttacttacttatgttgttaaaccaggtgagacaagtaaaagtagagaaaccaaagcgcagctagaagattatcttttagtggaaggatgtactcgtgatacggttatggtagcgatcggtggtggtgttattggtgacatgattgggttcgttgcatctacatttatgagaggtgttcgtgttgtccaagtaccaacatccttattggcaatggtcgattcctccattggtggtaaaactgctattgacactcctctaggtaaaaactttattggtgcattttggcaaccaaaatttgtccttgtagatattaaatggctagaaacgttagccaagagagagtttatcaatgggatggcagaagttatcaagactgcttgtatttggaacgctgacgaatttactagattagaatcaaacgcttcgttgttcttaaatgttgttaatggggcaaaaaatgtcaaggttaccaatcaattgacaaacgagattgacgagatatcgaatacagatattgaagctatgttggatcatacatataagttagttcttgagagtattaaggtcaaagcggaagttgtctcttcggatgaacgtgaatccagtctaagaaaccttttgaacttcggacattctattggtcatgcttatgaagctatactaaccccacaagcattacatggtgaatgtgtgtccattggtatggttaaagaggcggaattatcccgttatttcggtattctctcccctacccaagttgcacgtctatccaagattttggttgcctacgggttgcctgtttcgcctgatgagaaatggtttaaagagctaaccttacataagaaaacaccattggatatcttattgaagaaaatgagtattgacaagaaaaacgagggttccaaaaagaaggtggtcattttagaaagtattggtaagtgctatggtgactccgctcaatttgttagcgatgaagacctgagatttattctaacagatgaaaccctcgtttaccccttcaaggacatccctgctgatcaacagaaagttgttatcccccctggttctaagtccatctccaatcgtgctttaattcttgctgccctcggtgaaggtcaatgtaaaatcaagaacttattacattctgatgatactaaacatatgttaaccgctgttcatgaattgaaaggtgctacgatatcatgggaagataatggtgagacggtagtggtggaaggacatggtggttccacattgtcagcttgtgctgaccccttatatctaggtaatgcaggtactgcatctagatttttgacttccttggctgccttggtcaattctacttcaagccaaaagtatatcgttttaactggtaacgcaagaatgcaacaaagaccaattgctcctttggtcgattctttgcgtgctaatggtactaaaattgagtacttgaataatgaaggttccctgccaatcaaagtttatactgattcggtattcaaaggtggtagaattgaattagctgctacagtttcttctcagtacgtatcctctatcttgatgtgtgccccatacgctgaagaacctgtaactttggctcttgttggtggtaagccaatctctaaattgtacgtcgatatgacaataaaaatgatggaaaaattcggtatcaatgttgaaacttctactacagaaccttacacttattatattccaaagggacattatattaacccatcagaatacgtcattgaaagtgatgcctcaagtgctacatacccattggccttcgccgcaatgactggtactaccgtaacggttccaaacattggttttgagtcgttacaaggtgatgccagatttgcaagagatgtcttgaaacctatgggttgtaaaataactcaaacggcaacttcaactactgtttcgggtcctcctgtaggtactttaaagccattaaaacatgttgatatggagccaatgactgatgcgttcttaactgcatgtgttgttgccgctatttcgcacgacagtgatccaaattctgcaaatacaaccaccattgaaggtattgcaaaccagcgtgtcaaagagtgtaacagaattttggccatggctacagagctcgccaaatttggcgtcaaaactacagaattaccagatggtattcaagtccatggtttaaactcgataaaagatttgaaggttccttccgactcttctggacctgtcggtgtatgcacatatgatgatcatcgtgtggccatgagtttctcgcttcttgcaggaatggtaaattctcaaaatgaacgtgacgaagttgctaatcctgtaagaatacttgaaagacattgtactggtaaaacctggcctggctggtgggatgtgttacattccgaactaggtgccaaattagatggtgcagaacctttagagtgcacatccaaaaagaactcaaagaaaagcgttgtcattattggcatgagagcagctggcaaaactactataagtaaatggtgcgcatccgctctgggttacaaattagttgacctagacgagctgtttgagcaacagcataacaatcaaagtgttaaacaatttgttgtggagaacggttgggagaagttccgtgaggaagaaacaagaattttcaaggaagttattcaaaattacggcgatgatggatatgttttctcaacaggtggcggtattgttgaaagcgctgagtctagaaaagccttaaaagattttgcctcatcaggtggatacgttttacacttacatagggatattgaggagacaattgtctttttacaaagtgatccttcaagacctgcctatgtggaagaaattcgtgaagtttggaacagaagggaggggtggtataaagaatgctcaaatttctctttctttgctcctcattgctccgcagaagctgagttccaagctctaagaagatcgtttagtaagtacattgcaaccattacaggtgtcagagaaatagaaattccaagcggaagatctgcctttgtgtgtttaacctttgatgacttaactgaacaaactgagaatttgactccaatctgttatggttgtgaggctgtagaggtcagagtagaccatttggctaattactctgctgatttcgtgagtaaacagttatctatattgcgtaaagccactgacagtattcctatcatttttactgtgcgaaccatgaagcaaggtggcaactttcctgatgaagagttcaaaaccttgagagagctatacgatattgccttgaagaatggtgttgaattccttgacttagaactaactttacctactgatatccaatatgaggttattaacaaaaggggcaacaccaagatcattggttcccatcatgacttccaaggattatactcctgggacgacgctgaatgggaaaacagattcaatcaagcgttaactcttgatgtggatgttgtaaaatttgtgggtacggctgttaatttcgaagataatttgagactggaacactttagggatacacacaagaataagcctttaattgcagttaatatgacttctaaaggtagcatttctcgtgttttgaataatgttttaacacctgtgacatcagatttattgcctaactccgctgcccctggccaattgacagtagcacaaattaacaagatgtatacatctatgggaggtatcgagcctaaggaactgtttgttgttggaaagccaattggccactctagatcgccaattttacataacactggctatgaaattttaggtttacctcacaagttcgataaatttgaaactgaatccgcacaattggtgaaagaaaaacttttggacggaaacaagaactttggcggtgctgcagtcacaattcctctgaaattagatataatgcagtacatggatgaattgactgatgctgctaaagttattggtgctgtaaacacagttataccattgggtaacaagaagtttaagggtgataataccgactggttaggtatccgtaatgccttaattaacaatggcgttcccgaatatgttggtcataccgctggtttggttatcggtgcaggtggcacttctagagccgccctttacgccttgcacagtttaggttgcaaaaagatcttcataatcaacaggacaacttcgaaattgaagccattaatagagtcacttccatctgaattcaacattattggaatagagtccactaaatctatagaagagattaaggaacacgttggcgttgctgtcagctgtgtaccagccgacaaaccattagatgacgaacttttaagtaagctggagagattccttgtgaaaggtgcccatgctgcttttgtaccaaccttattggaagccgcatacaaaccaagcgttactcccgttatgacaatttcacaagacaaatatcaatggcacgttgtccctggatcacaaatgttagtacaccaaggtgtagctcagtttgaaaagtggacaggattcaagggccctttcaaggccatttttgatgccgttacgaaagagtag

SEQ ID NO: 658 - DNA, 817 bp, Saccharomyces cerevisiae
ccgccacagtttatcgcccgaaatgcagaataaagccttagaaaaagcgggattgccatttacctatatggccttcgaagtggataacgatagctttcctggagcaattgaaggattaaaagccctcaaaatgcgcggaactggtgtatcgatgccgaacaaacaactggcgtgtgaatatgttgatgaattaacaccagctgccaaactggtgggggccatcaacaccatcgttaatgatgatggctatctgcgtggctataacaccgacggcacgggccatattcgcgccattaaagagagcggttttgatatcaaaggcaaaacgatggtgctgttaggggccggtggtgcctcaacggcaattggcgcgcagggggcaattgaaggtttaaaagaaattaaactctttaaccgtcgggatgagttcttcgataaagccctcgccttcgcgcagcgggttaatgaaaacaccgattgtgtcgtcacggtcaccgatctcgccgatcagcaagcctttgctgaagccctggcttccgccgacattttaaccaatggcacaaaagtgggtatgaaaccccttgagaatgaatcattggttaatgatatcagtctgttacatccgggacttctggtcactgaatgcgtgtataacccgcatatgacgaagttattgcagcaggcgcaacaagctggttgcaaaacgattgatggatacggcatgttgttgtggcaaggggctgaacagttcacattatggactggcaaagatttccctctggaatatgttaaacaggtcatggggttcggtgcctga

SEQ ID NO: 659 - DNA, 2364 bp, Saccharomyces cerevisiae
atgctgtccgatacaattgacacaaagcaacaacagcaacagcttcatgtcctgttcatagactcttatgattcattcacctacaatgtagtgagactaattgaacaacaaactgatatctcaccgggagtcaacgccgtgcacgtgacgacggtacatagtgatacgttccaatctatggatcagctattgccacttttgccgctttttgatgctatcgttgttggcccaggacctgggaatcccaacaatggtgcacaagatatgggtataatatctgagcttttcgagaatgccaatggaaagttagatgaagttccaatattgggtatatgtcttgggttccaagcaatgtgcttggctcaaggtgctgatgtcagtgagctaaatactatcaagcatgggcaagtgtatgaaatgcatttaaacgatgcagccagagcttgtggccttttttctggttatcccgatacgttcaaatctacgaggtaccattcattgcatgtcaatgccgaaggcattgacacccttttgcccttatgcacaaccgaagatgagaacggtattcttttgatgagtgctcaaacgaaaaataagccatggtttggcgtacagtaccacccggagtcatgttgttcagaattgggggggctgttagtcagtaactttctcaagttgagtttcataaataacgtgaagacaggaaggtgggaaaagaagaaacttaatggagagttttccgatatcctatctcgattggataggactattgatagagaccccatatacaaggtaaaagagaaatatccgaagggcgaggacacaacttacgttaagcagttcgaggtctctgaagacccgaaattgacatttgaaatttgcaacatcatacgagaagaaaaatttgtcatgtcatcttctgtgattagtgaaaatacgggtgaatggtctatcattgctttaccaaactccgcatcccaggtattcactcattatggagctatgaaaaagactacagttcattattggcaagatagtgaaattagttacaccttgttgaaaaagtgtctagatggtcaagattcggatttgcctggctcccttgaggtaatacatgaagataaatcccaattttggatcactttgggtaaatttatggagaataaaataatcgataaccacagagaaataccttttattggaggtcttgttggcattttaggttatgaaataggtcagtacattgcatgcggccgttgcaatgatgatgagaattcccttgttcccgacgccaaactagtttttatcaacaatagtatagtcattaatcacaagcaagggaagctttattgtatttctctggataatacatttccagtggcattagaacaatcattaagggacagttttgttagaaagaagaatattaagcaatccctgtcctggcccaagtatcttccagaggagatagacttcattataactatgcccgataaacttgactacgctaaggcgtttaagaaatgtcaggattatatgcataagggtgattcttatgaaatgtgtctcacaacgcaaaccaaagttgtaccatctgcggtgatagaaccctggaggattttccagaccttggtacaaagaaacccggctccattttcaagtttttttgagtttaaagacattattccccgccaagatgaaacgcctccagttttgtgcttcttaagtacttctccagaaaggtttttgaagtgggatgcagacacatgcgagctacgtcccatcaagggaactgtgaaaaaaggaccgcaaatgaacttggcaaaagccacacgaatcctgaagacaccaaaagaatttggtgagaacttaatgattttggacttaatcagaaatgacctttacgagttggttcctgacgttcgggtggaggagttcatgtccgtgcaagaatatgccaccgtttaccaactcgttagcgtcgtaaaggcacatggattgacctctgccagtaagaagacgagatattcaggcattgatgtccttaaacactcgcttcctccgggatctatgacgggagcccccaagaagattactgtgcaattattgcaggacaagatagaaagcaagctaaacaaacatgtcaatggtggagcacgtggtgtttacagcggtgtcacgggatattggtctgtgaattccaacggagattggtctgttaacattagatgtatgtattcctacaacggcggaaccagctggcaactcggtgcagggggggccataacagtcttaagcacactagatggcgaactagaggaaatgtacaacaagttggagagcaacttacaaattttcatgtag

SEQ ID NO: 660 - DNA, 1125 bp, Saccharomyces cerevisiae
atgtcactaatggacaattggaagactgatatggaaagttacgatgaaggaggcctagttgctaatccgaacttcgaggttctggccactttcaggtacgaccctggttttgcacgccagtcagcgtcaaagaaagagatctttgaaactccagaccctcgattaggtttgagagacgaagatattaggcagcagataattaatgaggattactcaagttatttacgagtaagggaggttaattccggcggtgaccttctcgaaaatattcagcatcctgatgcttggaagcatgattgcaagaccattgtgtgccagcgtgtagaagatatgctacaagtcatttatgaacgattttttttattagatgaacaataccaaagaataagaatagcattatcatactttaaaattgacttcagcacgtctctgaatgatttattgaagttattggttgaaaacttgattaattgtaaagaaggaaattcagagtatcacgaaaaaattcaaaaaatgatcaacgaaaggcaatgctataaaatgcgggtacttgtctctaagacaggagatatacgaattgaggcaattccaatgcctatggagcctatcctaaaattaacaaccgattatgacagtgtttccacatacttcatcaaaacgatgctcaatggatttttaattgatagcacaataaattgggatgttgttgtttcatctgaaccattgaacgcatcagctttcaccagttttaaaaccacttcaagagatcattacgctagggcgagagttcgcatgcaaactgctataaataacttaagaggttcagaacctacttcttctgtctcgcaatgcgaaattttattttccaacaaatctggcctgctgatggaaggttcaataacaaacgtggctgtaattcaaaaagatcctaacggttctaaaaagtatgtgacaccaagattagcaactggatgtttgtgcggaacaatgcgtcattatttattgcggctcggccttattgaagagggagatatagatataggaagccttaccgttggcaacgaagttttgcttttcaatggcgtcatgggatgcataaagggaacagtgaagacaaaatattga

SEQ ID NO: 661 - DNA, 2475 bp, Saccharomyces cerevisiae
atgtcaaagctattttctactgtcaattctgcaagacatagtgtaccactaggcggcatgagagattatgtgcacattaagaaactagagatgaatacagttcttgggcctgattcctggaatcaattaatgcctcagaaatgtctactaagcttagatatgggtacagattttagtaaatctgcggctacggatgatttgaaatattctctaaattatgcagttatttctcgtgatttgacgaatttcgtcagcaaaaaaaagaattggggttctgtttctaatttggctaaatctgtgtctcaatttgttatggacaaatattctggtgtcgagtgtctgaatttagaagtgcaggcggatacaacgcatattagaagtgaccacatatcttgtattattcaacaagaaagagggaatccagaatcacaggaatttgacgttgttaggatatctgagttaaaaatgttgactttgattggtgttttcacctttgagagacttaagaaacagtatgtaactttggatataaagttgccttggccaaagaaagccgaattgccaccgccagtgcaaagcataattgataacgttgtcaagtttgtggaggaatcaaatttcaagactgtggaagctcttgtagaatctgtgtcagctgttattgcccataacgagtattttcaaaagtttccagattcgcctttggtggtgaaggttttgaaattaaacgcaatcacagccacagaaggtgttggtgtaagctgtattagagagcccagggagattgcgatggtaaatattccatatctttcctccatacatgaatcgtctgatattaagttccaattgtcttcatcacaaaacactcctattgagggtaaaaatacatggaaaagagcgtttttagcgtttggttcaaacattggggaccgtttcaaacacattcaaatggcgttgcaattattatcaagggaaaaaacggttaaattacggaatatttcgtctatttttgaaagtgaaccaatgtatttcaaagatcaaacccctttcatgaatgggtgtgttgaggtggagacattactgaccccaagcgaattattaaaattgtgtaaaaaaattgaatatgaagagttgcaaagagtcaagcattttgataatggtccgagaacaatagatctggatattgttatgtttttgaatagcgccggagaagatattatagtaaatgaaccggatttgaatataccgcatcctagaatgctggagaggactttcgttcttgagccgttatgtgaattaatatcccccgttcaccttcatcctgtgacagcggaacccattgtagaccatttaaaacagttatacgacaaacagcatgatgaagataccttatggaaattagttccattgccttatcgtagtggtgtggagcctagatttttgaaattcaagaccgctacaaaacttgacgaatttactggagaaacaaacagaattactgtttcacctacatatatcatggctatcttcaacgctacaccagattcattttccgatggaggtgagcattttgcggacattgaaagtcaattgaatgatatcattaaattgtgtaaagacgcattatatttgcatgagagcgtcatcatcgacgttggagggtgttctaccaggcctaactctattcaggcgtctgaggaagaagaaatacgcaggtctatcccattaattaaggccattagagaaagcactgagttaccgcaagataaagtcatactatccattgatacttatcgttccaatgtcgctaaagaagcgattaaagttggagtggatattattaatgatatttcgggaggtttatttgacagcaacatgtttgccgtaattgcagagaacccagaaatttgttatattttatcacacacacgtggtgatatttcaacgatgaataggctggcgcattacgaaaattttgcattgggtgattctattcagcaagaatttgttcataataccgacattcagcagctagacgacttgaaagacaaaacagtgttaatcaggaatgttggtcaagaaattggcgaaaggtatatcaaagcgattgataatggagtaaagcgctggcaaattctaatcgaccctggacttggttttgctaagacctggaagcaaaacttacaaattattagacatatccccattttaaagaactactcattcaccatgaactcaaacaattcgcaagtgtatgttaacctcagaaatatgcccgttttattgggtccatcgcgcaaaaaattcattggacatatcacaaaagatgtggatgcgaagcaaagagactttgctactggagcggtggtagcgtcgtgtattggtttcggcagcgacatggttagggtccatgacgttaaaaattgttcgaagagcattaaattagcagatgctatttataaaggtttggaataa

SEQ ID NO: 662 - DNA, 1284 bp, Saccharomyces cerevisiae
atggccattgaattgggactttcccgtattacaaaactactagagcatttaggcaatccgcaaaactcacttagagtgctgcacattgcagggacaaatggtaaaggttcagtatgtacttacctatcttctgtgttgcaacaaaagtcctaccaaattggaaaatttaccactccacacttggtgcatgttactgattccattacaatcaacaataagccgattccgttagagagataccagaatattagattacaactagaagctttaaacaagtcacactctttaaaatgtacggaattcgagctattaacatgtaccgcattcaaatatttttatgatgtgcagtgccaatggtgtgtcatagaagtaggccttggcggaagacttgatgcgaccaatgttattccaggcgcaaataaggcatgttgtggtattactaaaatcagtttggatcatgaaagctttttaggtaacaccttgtctgaaatctctaaagagaaagcaggtataataacagaaggggtacccttcacagtgattgatggaaccaatgaggcaagtgttataaatgttgtgaaagaaagatgcaaggctttagggtctgaactatccgttacagattctcaacttaacggaaatatgattgacaccaactcctggggttgttttgacttggcaaaattgccactgaatggagaatatcagatatttaatctcagggtggccatgggtatgttagactacttacaaatgaacgaacttattgatattaccaagaatgaagtaagtacgagattggcgaaggttgattggccaggaaggttatatcgtatggattatcgctttgacaaagtaagtaataggacagtgcctatattaatggacggtgcccacaatggctcagctgcagtagagttagttaagtacctaagaaaggagtacggaaaccagcctttgacctttgtgatggcagtaacgcatgggaaaaacttggagccgctgctccagccattattgaggcctatagatcaagtaattcttactcggtttaataatgtggaaggtatgccctggattcatgccactgatcctgaagaaataaaagattttattttgactcaaggatacacaaaggagatagtgattgaaaatgatttacatcaggtattgccttctctggcgcatgtatcagacgagcaaagacggccaattgttgtatgcggttcactgtatttatgtggtgaattattacggattcacaatagtcacttgagaaactaa

SEQ ID NO: 663 - DNA, 771 bp, Saccharomyces cerevisiae
atggatttcacaaaaccagaaactgttttaaatctacaaaatattagagatgaattagttagaatggaggattcgatcatcttcaaatttattgagaggtcgcatttcgccacatgtccttcagtttatgaggcaaaccatccaggtttagaaattccgaattttaaaggatctttcttggattgggctctttcaaatcttgaaattgcgcattctcgcatcagaagattcgaatcacctgatgaaactcccttctttcctgacaagattcagaaatcattcttaccgagcattaactacccacaaattttggcgccttatgccccagaagttaattacaatgataaaataaaaaaagtttatattgaaaagattataccattaatttcgaaaagagatggtgatgataagaataacttcggttctgttgccactagagatatagaatgtttgcaaagcttgagtaggagaatccactttggcaagtttgttgctgaagccaagttccaatcggatatcccgctatacacaaagctgatcaaaagtaaagatgtcgaggggataatgaagaatatcaccaattctgccgttgaagaaaagattctagaaagattaactaagaaggctgaagtctatggtgtggaccctaccaacgagtcaggtgaaagaaggattactccagaatatttggtaaaaatttataaggaaattgttatacctatcactaaggaagttgaggtggaatacttgctaagaaggttggaagagtaa

SEQ ID NO: 664 - DNA, 1359 bp, Saccharomyces cerevisiae
atggtatcagaggataagattgagcaatggaaagccacaaaagtcattggtataattggtctgggtgatatgggcctattatacgctaataaatttacagatgctggatggggtgttatatgttgtgatagggaagaatattatgatgaactgaaagaaaaatatgcctcagctaaattcgaactggtgaaaaatggtcatttggtatccaggcaaagcgactatattatctatagtgttgaagcatccaatattagtaagatcgtcgcaacgtatggaccatcttctaaggttggaacaattgttgggggtcaaacgagttgtaagctgccggaaatcgaggctttcgaaaagtatttacccaaggactgcgacatcattaccgtgcattcccttcatgggcctaaagttaatactgaaggccaaccactagttattatcaatcacagatcacagtacccagaatcttttgagttcgttaattctgttatggcatgtttgaaaagtaagcaagtttatttgacatatgaagagcatgacaagattaccgctgatacacaagctgtgacacatgctgctttcttaagtatgggatctgcgtgggcaaagataaagatttatccttggactctgggtgtaaacaaatggtacggtggcctagaaaatgtgaaagttaatatatcactaagaatctattcgaacaagtggcatgtttacgcaggattagccataacaaacccaagtgcacatcagcaaattcttcaatatgcaaccagtgcaacagaactatttagtttaatgatagataacaaagaacaagaacttactgatagactattaaaagctaagcaatttgtatttggaaagcatactggtctcttactattggatgacacgattttagagaaatattcgctatcaaaaagcagcattggtaacagcaacaattgcaagccagtgccgaattcacatttatcattgttggcgattgttgattcgtggtttcaacttggtattgatccatatgatcatatgatttgttcgacgccattattcagaatattcctgggtgtgtccgaatatctttttttaaaacctggcttattagaacagacaattgatgcagctatccatgataaatcattcataaaagatgatttagaatttgttatttcggctagagaatggagctcggttgtttcttttgccaattttgatatatacaaaaagcaatttcagagtgttcaaaagttctttgagccaatgcttccagaggctaatctcattggcaacgagatgataaaaaccattctgagtcattctagtgaccgttcggccgctgaaaaaagaaatacataa

SEQ ID NO: 665 - DNA, 1005 bp, Saccharomyces cerevisiae
atggccagcaagactttgagggttctttttctgggtcccaaaggtacgtattcccatcaagctgcattacaacaatttcaatcaacatctgatgttgagtacctcccagcagcctctatcccccaatgttttaaccaattggagaacgacactagtatagattattcagtggtaccgttggaaaattccaccaatggacaagtagttttttcctatgatctcttgcgtgataggatgatcaaaaaagccctatccttacctgctccagcagatactaatagaattacaccagatatagaagttatagcggagcaatatgtacccattacccattgtctaatcagcccaatccaactaccaaatggtattgcatcccttggaaattttgaagaagtcataatacactcacatccgcaagtatggggccaggttgaatgttacttaaggtccatggcagaaaaatttccgcaggtcacctttataagattggattgttcttccacatctgaatcagtgaaccaatgcattcggtcatcaacggccgattgcgacaacattctgcatttagccattgctagtgaaacagctgcccaattgcataaggcgtacatcattgaacattcgataaatgataagctaggaaatacaacaagatttttagtattgaagagaagggagaacgcaggcgacaatgaagtagaagacactggattactacgggttaacctactcacctttactactcgtcaagatgaccctggttctttggtagatgttttgaacatactaaaaatccattcactcaacatgtgttctataaactctagaccattccatttggacgaacatgatagaaactggcgatatttatttttcattgaatattacaccgagaagaataccccaaagaataaagaaaaattctatgaagatatcagcgacaaaagtaaacagtggtgcctgtggggtacattccccagaaatgagagatattatcacaaataa

SEQ ID NO: 666 - DNA, 1003 bp, Saccharomyces cerevisiae
tcctcctgtcgcattgctggaaaaattccccgctactgaaaatgccgcgaatacggttgcccatgcccgaaaagcgatccataagatcctgaaaggtaatgatgatcgcctgttggttgtgattggcccatgctcaattcatgatcctgtcgcggcaaaagagtatgccactcgcttgctggcgctgcgtgaagagctgaaagatgagctggaaatcgtaatgcgcgtctattttgaaaagccgcgtaccacggtgggctggaaagggctgattaacgatccgcatatggataatagcttccagatcaacgacggtctgcgtatagcccgtaaattgctgcttgatattaacgacagcggtctgccagcggcaggtgagtttctcgatatgatcaccccacaatatctcgctgacctgatgagctggggcgcaattggcgcacgtaccaccgaatcgcaggtgcaccgcgaactggcatcagggctttcttgtccggtcggcttcaaaaatggcaccgacggtacgattaaagtggctatcgatgccattaatgccgccggtgcgccgcactgcttcctgtccgtaacgaaatgggggcattcggcgattgtgaataccagcggtaacggcgattgccatatcattctgcgcggcggtaaagagcctaactacagcgcgaagcacgttgctgaagtgaaagaagggctgaacaaagcaggcctgccagcacaggtgatgatcgatttcagccatgctaactcgtccaaacaattcaaaaagcagatggatgtttgtgctgacgtttgccagcagattgccggtggcgaaaaggccattattggcgtgatggtggaaagccatctggtggaaggcaatcagagcctcgagagcggggagccgctggcctacggtaagagcatcaccgatgcctgcatcggctgggaagataccgatgctctgttacgtcaactggcgaatgcagtaaaagcgcgtcgcgggtaa

SEQ ID NO: 667 - DNA, 1542 bp, Saccharomyces cerevisiae
atgactgctggttctgccccccctgttgattacacttccttaaagaagaacttccaaccgtttctctccagaagagtagaaaatagatctctgaaaagcttttgggatgcttctgatatctcagatgacgtcattgagctagctggtggaatgccaaacgagagattttttcctatcgaatctatggatttgaaaatatcaaaagttccttttaatgataacccaaaatggcataattcgtttaccacggcgcatttggacttgggatcccccagtgagctacccattgcacgttctttccaatatgcagaaaccaagggtttaccccctctcttacattttgttaaagattttgtgtccagaattaatcgcccagccttttccgatgagacggagtctaactgggatgtcatcctttctggcgggtccaacgattcaatgtttaaggtttttgaaacaatttgcgacgaatcgaccactgtgatgattgaagagtttactttcaccccggctatgtccaatgtggaggctacaggagcaaaagtcatccccatcaagatgaacctgaccttcgacagagagtcccagggtattgatgtcgaatatctaacgcagttgctcgataattggtcaactggaccatacaaagacttaaacaagccaagggtcctatataccattgcaacgggccaaaatcctaccgggatgtctgtcccccagtggaaaagagagaaaatttaccagttggcccaaagacacgatttcctcattgttgaagatgatccctacggttatctgtactttccttcctataatccgcaagagccattagaaaacccttaccattctagcgacctgactactgaacggtatttgaatgattttttaatgaaatcattcttgactttggatacagatgcccgtgtcatccgtttggagactttttctaaaatttttgctcctggattaaggttatccttcatcgttgctaataaattccttttgcaaaaaatcttggatttggccgacattactacaagggcccccagtggtacctcacaagctattgtttattctacaataaaggcaatggctgagtccaacttatcgtcctctctttctatgaaagaagcaatgtttgagggttggataagatggataatgcagattgcttctaaatacaatcataggaaaaatcttactttgaaagccttatacgaaacagaatcttaccaagctggtcagtttaccgttatggaaccctccgcgggtatgttcatcattattaaaatcaattgggggaatttcgatagacctgacgatttgccgcaacagatggatattttagataagttcttgctgaagaatggtgttaaagtagtgcttggttataaaatggctgtttgcccaaattattcaaagcagaattcagattttctaagactcaccatcgcctatgcaagggatgatgatcagttgattgaagcttccaaaagaatcggtagtggcataaaagaattttttgacaactataaaagttga

SEQ ID NO: 668 - DNA, 1143 bp, Saccharomyces cerevisiae
atgtccgaggcgactttgctatcttacaccaagaaattattggcttctccgccgcaattgagtagcacagacctacacgatgcgttgctggttatattaagtcttttgcaaaaatgtgatacaaatagcgatgagagtctttccatctataccaaagtttcgagttttctcacggccttgagagttactaaacttgatcacaaggctgaatacattgcggaagctgcaaaggctgtgctcagacattccgaccttgttgatctacctttacccaagaaggacgaattacacccggaagatggaccagtaatcttagatattgtaggtactggtggtgacggacagaatacttttaatgtttccacgtctgctgctatcgttgcctccggaattcagggcctaaaaatttgtaagcacggtggtaaagcttctacatccaatagtggagctggtgacctaattggaactttaggctgtgacatgttcaaggttaattcatcgacagtgcccaaactttggcctgataatacgttcatgtttctacttgctcctttttttcatcatggaatgggccacgtttctaagatacgcaaatttcttggaattccgactgttttcaacgtactgggaccacttctacatccagttagccacgtaaacaagagaatattgggcgtttactcaaaggaacttgcgcctgaatatgccaaggcagccgctttggtatatccaggaagcgaaacttttatagtttggggacatgttgggttagacgaagtatcacctataggcaaaactactgtctggcatattgatccgacatcgtccgaacttaaattgaagaccttccaattagaaccttctatgtttggtttagaagaacacgagttgtcgaagtgtgcttcatacggccctaaagagaatgcgagaattctaaaagaagaagtcttgtccggcaagtaccaccttggcgacaataatcctatttatgactacatcttgatgaacaccgccgtgttatattgtttaagccaaggtcaccagaactggaaggaagggatcattaaggcagaagaaagcatacattctggtaatgcattacgttctttagaacactttatagatagtgtgagctccttgtag

SEQ ID NO: 669 - DNA, 675 bp, Saccharomyces cerevisiae
atgtctgttattaatttcacaggtagttctggtccattggtgaaagtttgcggcttgcagagcacagaggccgcagaatgtgctctagattccgatgctgacttgctgggtattatatgtgtgcccaatagaaagagaacaattgacccggttattgcaaggaaaatttcaagtcttgtaaaagcatataaaaatagttcaggcactccgaaatacttggttggcgtgtttcgtaatcaacctaaggaggatgttttggctctggtcaatgattacggcattgatatcgtccaactgcatggagatgagtcgtggcaagaataccaagagttcctcggtttgccagttattaaaagactcgtatttccaaaagactgcaacatactactcagtgcagcttcacagaaacctcattcgtttattcccttgtttgattcagaagcaggtgggacaggtgaacttttggattggaactcgatttctgactgggttggaaggcaagagagccccgaaagcttacattttatgttagctggtggactgacgccagaaaatgttggtgatgcgcttagattaaatggcgttattggtgttgatgtaagcggaggtgtggagacaaatggtgtaaaagactctaacaaaatagcaaatttcgtcaaaaatgctaagaaatag

SEQ ID NO: 670 - DNA, 1455 bp, Saccharomyces cerevisiae
atgtctgtgcacgctgcaacaaacccaatcaataagcatgtggttctaattgacaactacgattcctttacctggaacgtttacgagtacttgtgccaggagggcgccaaagtgagcgtctaccgtaacgatgcaattacagttccagaaattgccgccttgaatcccgacacattgcttatctcgcctggaccaggccacccaaagacagattctggcatttcaagagactgtatccggtactttactgggaaaattcctgtatttggaatctgtatgggccagcaatgcatgtttgacgtatttggtggtgaagttgcctacgctggtgagattgtccacggtaaaacgtccccaatctctcacgacaactgtggaattttcaagaacgtgccgcaaggtattgctgtgacaagataccattcattggccgggacagaatcgtccctaccatcctgcttgaaggttactgcgagtaccgaaaatggaattatcatgggtgtaagacacaagaagtacactgtagaaggtgtgcaatttcatccggaatccatcttgaccgaggaaggtcatctgatgatcaggaacattttaaacgtcagtggaggcacttgggaggaaaacaaatcatctccttcaaattctattttggaccgtatctatgctcggcgtaaaatagacgtcaatgagcagtctaaaatcccaggtttcacctttcaagacttacaatctaactatgatttaggtcttgccccaccgttacaggatttctacacggtgttgtcatcatcccataaaagagccgttgttcttgctgaagtcaagcgtgcctctccatcgaagggacccatttgtttaaaagctgttgctgctgaacaggctctcaaatacgcagaggctggtgcatccgcaatttccgtattgaccgaacctcattggtttcacggttcgttacaggatttagtaaatgtgaggaaaatcctagatttgaaatttcctcccaaggagaggccttgtgttttgagaaaagaatttattttcagcaagtatcaaatactagaagcaagattagctggagctgacactgtccttcttatagtcaagatgctatctcaacccttattgaaggaactgtacagctacagtaaagatttgaacatggaacctctcgttgaggtgaactccaaagaggaattacaaagggctctagaaattggtgctaaagttgtaggtgtcaataatagggacctgcattcattcaacgtagacctaaataccaccagtaacttggtagaatctattccaaaggatgttcttctaattgctctatcgggaattaccaccagggacgatgctgaaaaatacaaaaaagaaggtgtccatggatttttagtgggtgaagccctaatgaaatcaaccgatgtgaagaagttcattcatgaattatgcgaataa

SEQ ID NO: 671 - DNA, 2124 bp, Saccharomyces cerevisiae
atgtcagaacaactcagacaaacatttgctaacgctaaaaaagaaaacaggaacgccttggtcacatttatgaccgcaggttacccaacagtcaaagacactgtccctattctcaagggtttccaggatggtggtgtagatatcatcgaattgggtatgcccttctctgatccaattgcagatggtcctacaattcaattatctaatactgtggctttgcaaaacggtgttaccttgcctcaaactctagaaatggtctcccaagctagaaatgaaggtgttaccgtacccataatcctaatgggttactataaccctattctaaactacggtgaagaaagatttattcaggacgctgccaaggctggtgctaatggttttatcatcgtcgatttgccaccagaggaggcgttgaaggtcagaaactacatcaatgataatggtttgagcctgatcccactagtggctccttctaccaccgacgaaagattggaattactatcgcatattgccgattcgtttgtctacgttgtgtctagaatgggtactactggtgttcaaagttctgtggccagtgatttggatgaactcatctctagagtcagaaagtacaccaaggatactcctttggccgttgggtttggtgtctctaccagagaacatttccaatcagttggtagtgttgctgacggtgtagtgattggttccaaaatcgtcacattatgtggagatgctccagagggcaaaaggtacgacgttgctaaggaatatgtacagggaattctaaatggtgctaagcataaggttctgtccaaggacgaattctttgcctttcaaaaagagtccttgaagtccgcaaacgttaagaaggaaatactggacgaatttgatgaaaatcacaagcacccaattagatttggggactttggtggtcagtatgtcccagaagctcttcatgcatgtctaagagagttggaaaagggttttgatgaagctgtcgccgatcccacattctgggaagacttcaaatccttgtattcttatattggccgtccttcttcactacacaaagctgagagattaactgagcattgtcaaggtgctcaaatctggttgaagagagaagatcttaaccacacgggatctcacaagatcaacaatgctttagcacaagttcttctagctaaaagattaggcaagaagaacgttattgctgaaaccggtgctggtcaacacggtgttgccactgccactgcatgtgctaaatttggcttaacctgtactgtgttcatgggtgcagaagatgttcgtcgccaagctttaaacgtcttcagaatgagaattctcggtgctaaagtaattgctgttactaatggtacaaagactctaagagacgctacttcagaggcattcagattttgggttactaacttgaaaactacttactacgtcgtcggttctgccattggtcctcacccatatccaactttggttagaactttccaaagtgtcattggtaaagaaaccaaggaacagtttgctgccatgaacaatggtaaattacctgacgcagttgttgcatgtgttgggggtggttccaactctacaggtatgttttcaccattcgagcatgatacttccgttaagttattgggtgtggaagccggtggtgatggtgtagatacaaagttccactctgctactctaactgccggtagacctggtgtcttccatggtgtcaagacttatgtcttgcaagatagtgatggtcaagtccatgatactcattctgtttctgctgggttagactacccaggtgtcggtccagaattggcatattggaaatctactggccgtgctcaattcattgcagctactgacgctcaggctctgcttggctttaaattattatctcaattagaaggtattattcccgctttggaatcttctcatgctgtttatggcgcttgcgaattggctaagacgatgaagcctgatcaacatttggttatcaatatttctggtagaggtgataaagatgtccaaagtgtcgctgaagtcttgccgaaattaggtccaaagataggttgggatttgagattcgaagaagacccatctgcctaa

SEQ ID NO: 672 - DNA, 1524 bp, Saccharomyces cerevisiae
atgaccgcttccatcaaaattcaaccggatattgactctctaaagcaattacagcagcaaaatgacgatagttccataaatatgtatcccgtgtatgcgtatttgccatcattggatctgactcctcacgtggcatatctaaaattggcacaattgaacaaccctgatagaaaggaatcatttctgttggaaagtgctaagacaaataatgaattagatcgttattcattcataggtatctcgccacgcaagaccatcaaaaccggtcctactgaaggcattgaaacagatcctttggaaattttggaaaaggagatgtctacctttaaagtagccgaaaatgttcctggtttaccgaaattaagtggtggtgctattggttatatttcttatgactgtgttcgttatttcgagccaaaaacaagaaggcctttgaaagatgtcctaagacttccagaggcatatttaatgctttgtgataccattattgcctttgataatgtttttcagagatttcaaatcattcataacattaataccaatgaaacttcgttggaggaaggttaccaagctgcagcacaaataatcactgatatcgtatcaaagctaaccgacgattcctcgccaataccatatccagaacaacctcctattaaattgaatcaaacttttgaatcgaatgtgggcaaggaaggttacgaaaatcacgtctccactttgaagaagcatattaagaaaggtgatattattcaaggtgtgccatcgcaaagagtggcaaggccaacttcgttacatcctttcaatatttacagacatttacgtacagtgaacccatctccttacctgttttatattgattgtttggatttccaaatcattggtgcatctccagaattgttgtgcaaatcggattccaaaaatagagtcattacccatccaattgctggtactgtcaaacgtggggctactactgaagaggatgatgctttagcggaccaattacgtggctcgttaaaagaccgtgcagaacatgttatgctggtagatttagcaagaaacgatattaacagaatttgtgacccattaacaacaagtgtcgataaactgttaactattcaaaaattttctcatgtccaacatctggtttctcaagtcagcggtgttctccgcccagaaaagacaagatttgatgcattcagatcgattttccctgcaggtactgtcagtggtgctccaaaggttagagccatggaattgattgccgaactagaaggagaaaggcgtggggtttatgcaggcgccgtaggtcattggtcatacgacggtaaaacaatggacaattgtatcgctttaaggactatggtctataaagatggcattgcttacttgcaagctggcggtggtattgtttacgattcagatgagtacgatgaatatgtcgaaaccatgaataaaatgatggccaatcacagtactattgtgcaagcagaagaattgtgggccgatatcgtaggatcagcttaa

SEQ ID NO: 673 - DNA, 1257 bp, Saccharomyces cerevisiae; identical to SEQ ID NO: 653

SEQ ID NO: 674 - DNA, 1356 bp, Saccharomyces cerevisiae; identical to SEQ ID NO: 654

SEQ ID NO: 675 - DNA, 6645 bp, Saccharomyces cerevisiae
atggccactattgctcccactgctccaatcacccctccaatggaatctacgggtgaccgtctggttacgttggaacttaaggacggcacggtcttacaaggttattcatttggtgctgagaaatccgtcgctggtgaattagttttccaaactggtatggttggttatcctgaatctgtgaccgatccatcttatgaaggccagatcttagtcatcacttacccattggtaggcaattatggtgtcccagatatgcacttgagagatgaattggtcgaagaattgccaagatattttgaaagtaatagaatccatattgccggtttagttatttctcactataccgacgagtactctcattatcttcgtaaatcttccttaggtaaatggttacaaaatgaagggatcccagctgtttatggtgttgatacaagatcattgaccaagcatttgagagatgcaggttcaatgttgggtaggttgtctttggaaaaaagcggctctgacagaaccatctccagatcttcctcttggagaagtgcgtttgatgttcctgaatgggtggatccaaatgttcaaaacctagtttctaaggtctccatcaatgaacctaaattgtacgttcctccagcagacaataagcacatcgaattgcaaaccggacccgatggtaaagttttaaggattctagccattgacgtgggtatgaaatacaatcaaattcgttgttttatcaaaaggggtgtagaattgaaagttgttccatggaactacgatttcactaaagaagattatgatggtctgtttatttcaaatggtccaggtgatccatctgttctagatgatctatctcaaagattgtcaaatgtcctggaggctaaaaagacgccagtattcggtatttgtctcggtcatcaattgatagcaagagctgccggtgcatccaccctaaaactaaaatttggtaaccgtggtcataacataccttgtacatcaactataagtggtcgttgttacataacatctcaaaaccatgggttcgctgtggatgttgacactctaacttccggatggaagccattgtttgttaacgcgaatgatgactctaacgaaggtatctatcattctgaattaccttatttttccgtccaattccatccagaatccacacctggcccaagagatacagaattcttgtttgacgtttttatccaagcagttaaagaattcaagtatacacaagtgttgaaaccaatcgctttcccaggtggcctattagaggataacgttaaggcacaccctagaatcgaagcgaagaaggttctagttctcggttctggtggtttgtccatcggtcaagctggtgaatttgactactctggttctcaagccatcaaagctttgaaagaagaaggtatctatacaattttaattaatccaaacattgctaccatccaaacttcgaaagggttggctgataaggtttattttgttcctgttactgcagagttcgtgagaaaagttattttacatgaaaggccggacgccatttatgtgacatttggtggacaaactgctttatctgttggtatagccatgaaagatgaatttgaggcgttaggagttaaagtattgggtactccaatcgatactattattaccacggaagaccgtgaactcttcagtaatgccattgacgaaattaatgaaaaatgtgcgaaatctcaagctgctaattcagtggacgaggcattggccgctgtcaaggagatcggtttcccagttattgtacgtgctgcatatgcattgggaggtttaggttccggtttcgctaataatgaaaaagaattggttgatctatgtaatgttgcattttcatcctcacctcaagttttagtcgagaaatctatgaaaggttggaaagaagtcgaatatgaagttgttcgtgatgcttttgacaactgtattactgtttgtaatatggaaaattttgatccactaggtattcacaccggtgattccatcgttgtagccccatctcaaactttatctgatgaagattacaatatgttaagaactactgctgttaatgttattagacacttaggtgttgttggtgaatgtaatatccaatatgctttaaatcccgtttctaaggattattgcatcattgaagttaatgcgcgtttgtcacgttcctctgctttagcttctaaggctactggttacccattggcctacactgcggctaagttaggtttgaatatcccattaaatgaagttaagaattccgtcacaaaatccacatgtgcttgttttgaaccttctctagactactgtgttgtcaaaatgccaagatgggatttgaagaagttcaccagagtttctaccgaattatcttcatcaatgaaatctgttggtgaagttatgagcatcggtagaaccttcgaagaagctattcaaaaagctatcagatccacagaatatgctaacctcggattcaatgagacagatctagatatcgacattgattacgagttgaacaaccctacggatatgcgtgtcttcgccattgcaaatgcttttgctaagaagggatattctgttgataaagtctgggaaatgactagaattgataagtggtttttaaacaaactgcacgatttggtccaatttgctgagaaaattagttcatttggtactaaagaggaattaccttccttagttttaagacaggctaagcagttaggttttgatgacagacagattgcaagatttttggattccaacgaagttgccatccgtagattaagaaaagaatatggaattacaccatttgtcaaacaaattgatacagttgccgctgaattccccgcttacacgaactatttatacatgacatacaatgctgactcacacgatttatcctttgatgaccacggtgttatggtcttgggttctggtgtttaccgtatcggttcttctgtcgaatttgattggtgtgctgttactgcagttagaacattacgtgccaacaatatcaaaactatcatggtcaactataatccagaaactgtttccacagattatgatgaggctgatagactatactttgaaaccatcaaccttgaaagagttttggatatttacgagattgaaaactcaagcggtgttgtcgtatcaatgggtggtcaaacttccaacaacatcgccatgactttacatcgtgaaaatgtaaagattcttggtacatcccctgacatgattgattctgctgaaaaccgttacaagttctctcgtatgttggatcaaattggtgttgaccaaccagcttggaaagaattgacatccatggacgaagctgaatcttttgccgaaaaggtgggttatccagttttggtacgtccatcttatgtgttatccggtgccgccatgaatactgtttattctaaaaacgatttggaatcctacttaaaccaagccgtcgaagtttcacgtgattatcctgttgttatcactaaatatattgaaaacgcaaaggagattgaaatggatgcagttgcaagaaatggtgaattggttatgcatgttgtctctgagcatgttgaaaatgcaggtgtccactcgggtgatgcaacattaatcgttccacctcaagatttggctcctgaaactgtggatagaattgttgtcgccactgctaaaattggtaaggctttgaaaattacaggtccatacaacatccaattcattgcaaaggacaatgaaatcaaggtcatagaatgtaatgttcgtgcttcgagatctttcccattcatttcaaaggttgttggcgtcaatctgattgaattggcaacaaaggccataatgggtttgcctttgacgccttatcctgttgaaaaattaccagatgattatgtcgccgttaaagtaccacaattctctttcccacgtttagcaggagctgatccagtcttaggtgttgaaatggcctctactggtgaagtcgctacttttggccactcgaagtatgaagcatacttaaagtctttgttggcaaccggcttcaaacttccaaagaagaatattttattgtctattggttcttacaaggaaaaacaagaattgctttcttccgtacaaaaactatacaacatgggatataaattatttgcaacatcaggtactgctgactttttatctgaacatggtattgccgtccaatatctggaggttttaaacaaggatgatgatgatcaaaaatcagaatactcacttactcaacatttggctaataatgaaattgacctttacatcaacttgccttctgccaacaggttccgtcgtcctgcatcctatgtttcaaaggggtataaaacacgtcgtttggctgtcgattattcggttccgttggttactaacgttaaatgtgcaaaattgttgattgaagccatttcaagaaatatcactttagatgtttctgaacgtgatgcacaaacttcccacagaactattaccttacctggtttaatcaatatcgcaacttatgttccgaatgcatcccatgttatcaaaggcccagctgaactgaaggagaccacacgtctatttttggaatccggttttacatactgtcaattgatgcccagatccatcagcggacctgttattactgacgttgcatccttgaaggccgcaaactctgtttcccaagattcatcttacactgacttttctttcactattgctggtacagcacacaatgctcatagtgttacgcaatctgctagcaaagtgacagcattgtttttgcccctacgtgaattaaagaacaagatcacagcagtagctgaacttctgaatcagtggccaactgaaaagcaagtgattgcagaagctaaaactgcagatttggcatcggttttattgttaacctcccttcaaaacagatctattcacattactggtgtttcgaataaggaagatttagctttgatcatgacggtcaaggcaaaagaccctagagtgacttgtgatgtcaatatttattctttgtttattgcccaagatgactatccggaggcagttttcttgcctactaaggaagatcaagagtttttctggaacaaccttgatagtatcgatgctttctctgtcggtgctcttcctgtcgccttggcaaatgtcacaggtaacaaggttgatgttggtatgggtatcaaagattcattaccactattgttggctgctgttgaagaaggtaaattaaccattgatgatatcgtccttcgtctgcatgacaatcccgctaaaattttcaacatccctactcaggactcagttgtcgaaattgatttggattattctttcagacgtaataagagatggtcaccattcaacaaagatatgaacggtggtattgagcgtgttgtctataatggcgaaacattagttttgagcggtgaattagtttcaccaggcgccaaaggaaaatgcattgttaatccaagtccagcttccataactgcttccgcagagctccaatctactagtgctaaaagaaggttctcgatcacggaagaagcaatcgctgataatttagatgccgcggaggatgcaattccagaacagcctttggaacaaaaattgatgtcttcaaggccaccaagagaacttgttgctccaggcgccatccagaatttgatccgtagtaacaatccattccgcggaagacatatattgtctatcaaacaattcaaacgttctgatttccatgtgttgtttgctgttgcacaagaactaagggcagctgtcgcaagagaaggtgtcttagatttaatgaaaggccacgttattactacaattttctttgaaccatctactcgtacttgttcttcattcattgctgctatggaacgtttgggtggtagaattgtaaatgttaatccattggtgtcttctgtcaagaaaggtgaaacccttcaagatactatcagaactttggcttgttacagtgatgccattgtcatgcgtcattcagaagaaatgtctgttcatatcgccgctaaatattctcctgttccaattattaatggtggtaatggttctcgcgagcatcctacgcaggccttcttggatttgtttacgattcgtgaagaaatcggtactgttaatggtattactgttactttcatgggtgatctcaaacatggtagaaccgtacattcattgtgtcgtttgttaatgcactatcaagtcagaattaatcttgtttctcctccggaattgaggttaccagaaggattaagagaagagctaagaaaagctggcttacttggtgttgagagcattgaattaacccctcatatcatctcaaagaccgatgttctgtattgtacaagggtccaagaagaaagattcaatagccctgaagaatatgcacgtctgaaggatacttatatcgtggacaacaagatcttggcacacgccaaagaaaatatggctatcatgcatccattgcctcgtgtaaatgaaatcaaagaggaagtggactacgatcatcgtgctgcttacttcagacaaatgaagtatggtttgttcgtcagaatggctttgttggccatggtcatgggtgttgatatgtga

SEQ ID NO: 676 - DNA, 1584 bp, Saccharomyces cerevisiae
atgccaatggatttccaacctacatcaagtcattcgaactgggtcgtgcaaaagttcggtggtacatctgtcggtaaatttcccgtccaaatagtggatgacattgtgaagcactattctaaacctgacggcccaaacaataatgtcgctgtcgtttgttccgcccgttcttcatacaccaaggctgaaggtaccacttctcgtcttttgaaatgttgtgatttggcttcgcaagaatctgaatttcaagacattatcgaagttatcagacaagaccatatcgataatgccgaccgcttcattctcaatcctgccttgcaagccaagttagtggatgataccaataaagaacttgaactggtcaagaaatatttaaatgcttcaaaagttttgggtgaagtgagttcacgtacagtagatctggtgatgtcatgtggtgagaagttgagttgtttgttcatgactgctttatgtaatgaccgtggctgtaaggccaaatatgtggatttgagccacattgttccctctgatttcagtgccagcgctttggataacagtttctacactttcctggttcaagcattgaaagaaaaattggccccctttgtaagtgctaaagagcgtatcgttccagtctttacagggttttttggtttagttccaactggtcttctgaatggtgttggtcgtggctataccgatttatgtgccgctttgatagcagttgctgtaaatgctgatgaactacaagtttggaaggaagttgatggtatatttactgctgatcctcgtaaggttcctgaagcacgtttgctagacagtgttactccagaagaagcttctgaattaacatattatggttccgaagttatacatccttttacgatggaacaagttattagggctaagattcctattagaatcaagaatgttcaaaatccattaggtaacggtaccattatctacccagataatgtagcaaagaagggtgaatctactccaccacatcctcctgagaacttatcctcatctttctatgaaaagagaaagagaggtgccactgctatcaccaccaaaaatgacattttcgtcatcaacattcattccaataagaaaaccctatcccatggtttcctagctcaaatatttaccatcctggataagtacaagttagtcgtagatttaatatctacttctgaagttcatgtttcgatggctttgcccattccagatgcagactcattaaaatctctgagacaagctgaggaaaaattgagaattttaggttctgttgatatcacaaagaagttgtctattgtttcattagttggtaaacatatgaaacaatacatcggcattgctggtaccatgtttactactcttgctgaagaaggcatcaacattgaaatgatttctcaaggggcaaatgaaataaacatatcctgcgttatcaatgaatctgactccataaaagcgctacaatgtattcatgccaagttactaagtgagcggacaaatacttcaaaccaatttgaacatgccattgatgaacgtttagaacaattgaaaagacttggaatttaa

SEQ ID NO: 677 - DNA, 1098 bp, Saccharomyces cerevisiae
atggctggaaagaaaattgctggtgttttgggtgctactggttccgttggtcaacgtttcattctgttgttggcaaatcaccctcatttcgaactgaaagttcttggtgcctcttctagatcagctggcaagaaatacgttgacgctgtgaactggaagcaaaccgatttgctaccggaatctgctaccgatattattgtttccgaatgtaaatctgaattctttaaagagtgtgacatcgtcttttccggattggatgctgactatgctggcgctatcgaaaaggaattcatggaagctggtatcgccattgtttccaatgccaagaattatagaagagaacaagatgtgccattgattgttcctgttgtcaatcctgagcatttggatattgtagctcaaaagcttgacaccgccaaggctcaaggtaagccaagaccagggttcattatctgtatttccaattgttccactgcaggtttggttgcaccattgaagcctttgattgaaaaattcggtcctattgatgctttgaccactactactttgcaagcaatctcaggtgctggtttctccccaggtgtaccaggtattgatattctagacaatattattccatacattggtggtgaagaagacaagatggaatgggagaccaagaaaatcttggctccattagcagaagacaagacacacgtcaaactattgactccagaagaaatcaaagtctctgctcaatgtaacagagtcgctgtttccgatgggcacaccgaatgtatctctttgaggttcaagaacagacctgctccatccgtcgagcaagtcaagacatgcctaaaagaatacgtctgcgatgcctacaaattaggctgtcattctgctccaaagcaaactattcatgttttggaacaaccagacagacctcaaccaaggttggacaggaacagagacagcggttacggtgtttccgttggtagaatcagagaagacccattgttagatttcaaaatggttgtcctttcccacaacaccattattggtgccgctggttctggtgtcttgattgccgaaatcttactagcaagaaacttgatttaa

SEQ ID NO: 678 - DNA, 1080 bp, Saccharomyces cerevisiae
atgagcactaaagttgttaatgttgccgttatcggtgccggtgttgttggttcagctttcttggatcaattgttagccatgaagtctaccattacttacaatctagttcttttggctgaagctgagcgttctttaatctccaaggacttttctccattaaatgttggttctgattggaaggctgctttagcagcctccactactaaaacgttgcctttggatgatttaattgctcatttgaagacttcacctaagccagtcattttggttgataacacttccagcgcttacattgctggtttttacactaagtttgtcgaaaatggtatttccattgctactccaaacaagaaggccttttcctctgatttggctacctggaaggctcttttctcaaataagccaactaacggttttgtctatcatgaagctaccgtcggtgctggtttgcctatcatcagtttcttaagagaaattattcaaaccggtgacgaagttgaaaaaattgaaggtatcttctctggtactctatcttatattttcaacgagttctccactagtcaagctaacgacgtcaaattctctgatgttgtcaaagttgctaaaaaattgggttatactgaaccagatccaagagatgatttgaatgggttggatgttgctagaaaggttaccattgttggtaggatatctggtgtggaagttgaatctccaacttccttccctgtccagtctttgattccaaaaccattggaatctgtcaagtctgctgatgaattcttggaaaaattatctgattacgataaagatttgactcaattgaagaaggaagctgccactgaaaataaggtattgagattcattggtaaagtcgatgttgccaccaaatctgtgtctgtaggaattgaaaagtacgattactcacacccattcgcatcattgaagggatcagataacgttatttccatcaagactaagcgttacaccaatcctgttgtcattcaaggtgccggtgccggtgctgccgttactgccgctggtgttttgggtgatgttatcaagattgctcaaagactttag

SEQ ID NO: 679 - DNA, 1461 bp, Saccharomyces cerevisiae
atgtcgcatactttaaaatcgaaaacgctccaagagctggacattgaggagattaaggaaactaacccattgctcaaactagttcaagggcagaggattgttcaagttccggaactagtgcttgagtctggcgtggtcataaataatttccctattgcttataagacgtggggtacactgaatgaagctggtgataatgttctggtaatttgtcatgccttgactgggtccgcagatgttgctgactggtggggccctcttctgggtaacgacttagcattcgacccatcaaggttttttatcatatgtttaaactctatgggctctccatatgggtctttttcgccattaacgataaatgaggagacgggcgttagatatggacccgaattcccattatgtactgtgcgcgatgacgttagagctcacagaattgttctggattctctgggagtaaagtcaatagcctgtgttattggtggctctatgggggggatgctgagtttggaatgggctgccatgtatggtaaggaatatgtgaagaatatggttgctctggcgacatcagcaagacattctgcctggtgcatatcgtggtctgaggctcaaagacaatcgatttactcagatcccaactacttggacgggtactatccggtagaggagcaacctgtggccggactatcggctgcacgtatgtctgcattgttgacgtacaggacaagaaacagtttcgagaacaaattctccagaagatctccttcaatagcacaacaacaaaaagctcaaagggaggagacacgcaaaccatctactgtcagcgaacactccctacaaatccacaatgatgggtataaaacaaaagccagcactgccatcgctggcatttctgggcaaaaaggtcaaagcgtggtgtccaccgcatcttcttcggattcattgaattcttcaacatcgatgacttcggtaagttctgtaacgggtgaagtgaaggacataaagcctgcgcagacgtatttttctgcacaaagttacttgaggtaccagggcacaaagttcatcaataggttcgacgccaattgttacattgccatcacacgtaaactggatacgcacgatttggcaagagacagagtagatgacatcactgaggtcctttctaccatccaacaaccatccctgatcatcggtatccaatctgatggactgttcacatattcagaacaagaatttttggctgagcacataccgaagtcgcaattagaaaaaattgaatctcccgaaggccacgatgccttcctattggagtttaagctgataaacaaactgatagtacaatttttaaaaaccaactgcaaggccattaccgatgccgctccaagagcttggggaggtgacgttggtaacgatgaaacgaagacgtctgtctttggtgaggccgaagaagttaccaactggtag

SEQ ID NO: 680 - DNA, 1335 bp, Saccharomyces cerevisiae
atgccatctcatttcgatactgttcaactacacgccggccaagagaaccctggtgacaatgctcacagatccagagctgtaccaatttacgccaccacttcttatgttttcgaaaactctaagcatggttcgcaattgtttggtctagaagttccaggttacgtctattcccgtttccaaaacccaaccagtaatgttttggaagaaagaattgctgctttagaaggtggtgctgctgctttggctgtttcctccggtcaagccgctcaaacccttgccatccaaggtttggcacacactggtgacaacatcgtttccacttcttacttatacggtggtacttataaccagttcaaaatctcgttcaaaagatttggtatcgaggctagatttgttgaaggtgacaatccagaagaattcgaaaaggtctttgatgaaagaaccaaggctgtttatttggaaaccattggtaatccaaagtacaatgttccggattttgaaaaaattgttgcaattgctcacaaacacggtattccagttgtcgttgacaacacatttggtgccggtggttacttctgtcagccaattaaatacggtgctgatattgtaacacattctgctaccaaatggattggtggtcatggtactactatcggtggtattattgttgactctggtaagttcccatggaaggactacccagaaaagttccctcaattctctcaacctgccgaaggatatcacggtactatctacaatgaagcctacggtaacttggcatacatcgttcatgttagaactgaactattaagagatttgggtccattgatgaacccatttgcctctttcttgctactacaaggtgttgaaacattatctttgagagctgaaagacacggtgaaaatgcattgaagttagccaaatggttagaacaatccccatacgtatcttgggtttcataccctggtttagcatctcattctcatcatgaaaatgctaagaagtatctatctaacggtttcggtggtgtcttatctttcggtgtaaaagacttaccaaatgccgacaaggaaactgacccattcaaactttctggtgctcaagttgttgacaatttaaagcttgcctctaacttggccaatgttggtgatgccaagaccttagtcattgctccatacttcactacccacaaacaattaaatgacaaagaaaagttggcatctggtgttaccaaggacttaattcgtgtctctgttggtatcgaatttattgatgacattattgcagacttccagcaatcttttgaaactgttttcgctggccaaaaaccatga

SEQ ID NO: 681 - DNA, 1920 bp, Saccharomyces cerevisiae
atgatatctagaaccattggtgaatctattccgcccaacacaaaacatgctgtttccgtgtgtttgcccacatgggaagctacagtaggctatgaagagggtgaaagcagtataattaactcgcttactaccggatatccaagatttttcatacacaagtcaataaagaaattatgtgaaattttatccgctaagtactccatggaagatgaagcttgtctttgcttcccctcttacaaggttgccaataggtgcagagagtttatcaaagtgaaaacgggtctttctaccaaagtacgcatcttacaactatgtacacctaaacctatgaaccaagaggaaaagctctggagaagggaatgtaaaatcacggtggtgtttgtagaccaggaaatattccccgtgatgaagcagtattggcaacattctggtgagattgtatctagcagaatggcggagtatattttacatgaattacaagtcaaggataatcttaagaagatggaaacagtggataacggtaaaaaatttatgaccgaagatgaaaacagagtgaacgaagaatatatagaaacgagatttgggagaaatttaaattttcttgctgctgataaagccaaatatctaatacgaaagaggattgccacaaaagttgttgaaaaaattgactctgaaggtctatcggacctattctcttttgaacactataacgagagcaacggtccattcaatgttggcagtggagaggctctggatgatgatcagttgaattcggacatacctgccgaaacaattacttctatgggagaaagtggctcaaacagtacttttgaaaacacagctaccgatgacttgaagtttcatgtcaaccctaatacggatgtttacttatttccaagtggaatggcgtccattttcactgcccacaggctgcttttaaacttcgatgccaagcgcttatcaaggtcttctagtagacaagataagttgattggatatggacctccgttcaagaagaccgtcatgtttggattcccatatacagatactctgagcattcttcggaagttcaatcacacacatttcttgggacagggagattcaacgtcaatgaacgctctgaaaaatattttacattctggtgagcaaatactggcggtatttatagaagctccatcgaacccactgttgaaaatgggagatttacaagaactgaaaaggctatcagacttgtattcattttacatagtggtcgatgaaactgtgggtggctttgtcaatatagatgtattaccgtatgccgatattgtttgtagttcgctaacgaaaatcttcagcggcgactcgaacgttattgcaggatccttagtactaaatcctagaggaaagatttatgagtttgctagaaaatttatgaagactgaagacggatatgaagattgcctatggtgcgaagatgcgttatgcctggaaagaaattcgagagacttcgtggaacgtacaatcaaggtgaatacaaacactgatatattgttaaaaagggtgttattgcctcaggtgggaaaattgttcaagaaaatatattaccccagtttaacatcagaggataccaagcggaattatgacagcgttatgtctacaaaagatggtgggtatggaggtttattttcactaacttttttcaatattgaagaggcaaagaagtttttcaataatctggaattgtgcaaaggaccttctctcggtacgaatttcactttggcgtgtccatatgctattattgcccactaccaggaattagacgaggtagctcaatatggtgtcgaaacaaatcttgtaagagtgagcgtcggtttggaaaatagcgacgttttatgcaatgtttttcagcgtgccattgagaaagctttaggggaataa

SEQ ID NO: 682 - DNA, 1074 bp, Saccharomyces cerevisiae
atggttcgtgccttcaaaattaaagttccagcttcttccgccaatatcggccctggttatgatgttcttggtgtcggtctttctctattcttggagttagatgtcaccatcgactccagccaagctcaggaaacaaacgacgatcccaacaactgcaagctgtcttacactaaagaaagtgaaggctattctacggtcccattgcgttctgatgctaacctgattaccaggactgcgttatatgtgttgcgttgcaacaatattagaaacttcccctccggaaccaaagttcacgtctccaacccaatcccacttggccgtggattgggttcctctggtgcagcagttgtggcaggtgttattttaggtaacgaagtggcccaattgggtttctctaagcaacgtatgttggactactgtttgatgattgaacgtcatccagacaacataaccgctgctatgatgggaggcttttgcggttcattcctaagggacttgaccccacaagaggtggaaagacgtgagattccattggctgaggtgcttccagaaccttctggtggtgaagataccggtctggttcccccattacctcccaccgatatcggtagacatgtcaaataccaatggaaccccgccattaaatgtattgcgatcatcccacagttcgagttgtccaccgccgactccagaggcgttcttccaaaagcctacccaacccaggacttggttttcaatctacaaagattggccgtcttgaccacagctttgaccatggacccacctaatgccgacttaatctaccctgctatgcaagatcgtgtccaccaaccttatagaaagacattgatcccaggtctcacggaaatcttatcatgtgtcaccccatccacataccctggcctattgggtatctgcttgtcaggtgcaggcccaactatcttggctttggccactgagaatttcgaagaaatctctcaagaaattatcaacaggttcgccaaaaacggcatcaagtgctcctggaaactactggagcctgcctacgatggtgctagcgtcgaacagcaatga

SEQ ID NO: 683 - DNA, 1545 bp, Saccharomyces cerevisiae
atgcctaacgcttcccaagtttacagatctaccagatccagctctccaaagacaatctcttttgaagaggctatcattcaaggtctggccactgacggtggtcttttcattccaccaactattccacaagtggaccaagccactcttttcaatgattggtcaaagctctccttccaagacttagcctttgctatcatgagactatacattgcccaagaagagattccagatgctgatctaaaggacttgatcaagagatcttattctactttccgttctgatgaagtcacccccttggtgcaaaacgtcactggtgacaaggagaatttgcacattttagaattattccacggtcctacctacgctttcaaagacgttgctttacaatttgtcggtaatctttttgaatacttcttacaaagaaccaacgccaatttacctgaaggcgagaaaaagcaaatcactgtggtcggtgctacttccggtgacactggttctgcagccatctacggtttaagaggcaaaaaggacgtttccgttttcatcttatatccaaccggtagaatttccccaattcaagaagaacaaatgaccaccgttccagatgaaaacgtccagactttgtctgttaccggtactttcgacaactgtcaagatatcgtcaaagctattttcggtgacaaagaattcaactctaaacacaacgtcggtgctgttaactccatcaactgggcaagaatcttggcccaaatgacctattacttttattcattcttccaagccaccaacggtaaggactccaagaaggtcaagttcgttgtgccaagtgggaacttcggtgatatattggccggttattttgccaagaaaatgggtttgcctattgaaaaactggccatcgctaccaatgaaaacgacattttggacagatttttgaaatctggtctatacgaaagatcagacaaggttgctgctactttatccccagcaatggatatcttaatctcttctaactttgaaagactactatggtacctagctcgtgaatacctagctaatggtgatgatttgaaagccggtgaaatcgtcaacaattggttccaggaattgaagaccaacggtaagttccaagttgacaaatccatcattgaaggcgcatcaaaggactttacatcagaaagagtttccaatgaagaaacatctgaaacaatcaagaagatctacgaatcatctgtaaatccaaaacattacatcttagatcctcacacagctgtcggtgtttgcgccacagaaagattgattgcaaaagataatgacaagtccatccaatacatttctctatctaccgctcacccagctaaatttgccgatgctgtaaacaatgcattgtctggattttccaattattcatttgaaaaggatgttttgcctgaggaattgaagaaactatccacattaaagaagaaattaaaattcatcgaaagagctgacgttgaattggtcaaaaacgctattgaagaagaacttgctaaaatgaaattataa

SEQ ID NO: 684 - DNA, 1731 bp, Saccharomyces cerevisiae
atgtcagctactctactaaagcaaccattatgtacggttgttcggcaaggtaaacagtccaaagtgtctggattgaaccttttgagactaaaggctcatttgcacagacaacacctgtcaccttccttgataaaactacactctgaattgaaattggatgagctgcaaactgataacacccctgattacgtccgtttagttttaaggtcctctgtatacgatgttattaatgaatctccaatctctcaaggtgtaggtttgtcttcccgtctaaacacgaatgtcatcttgaaaagagaagatctattgcctgttttctctttcaagcttcgtggtgcctataacatgattgccaagttggacgattctcaaagaaaccagggtgttattgcctgttcagctgggaatcatgcccaaggtgtggcctttgctgctaaacacttgaaaatacctgctactatcgttatgcctgtttgtacaccatctattaagtatcaaaatgtctcgagattagggtctcaagtcgtcctatatggtaacgattttgacgaggctaaggctgaatgtgccaaattggctgaagagcgtggcttgacgaacattcctcctttcgatcatccttatgtcattgccggtcaaggtactgtagctatggaaatcctaagacaagtacgtaccgctaataagatcggtgctgtctttgttcccgtcggcggtggtggtttaattgctggtattggtgcttatttgaaaagggttgctcctcatatcaaaatcattggtgttgaaacttacgatgcggccactttacataattccttgcaacgcaaccagagaactcctttacctgtggtgggtacttttgccgatggtacgtctgtgcgtatgattggtgaagaaacatttagagtcgcccaacaagtggttgatgaagttgttcttgttaacactgacgaaatctgtgctgcagtaaaggatatttttgaagatactagaagtattgtagaaccatctggtgccctttcagtagccggtatgaagaaatacatctctaccgtacatccagaaattgaccacactaaaaacacctatgttcccatcctttctggtgctaacatgaactttgatagattaagatttgtttccgaacgtgctgttcttggtgaaggaaaggaagtcttcatgttagttactttacccgacgtccctggtgcgttcaagaaaatgcaaaagatcatccacccaagatctgtcactgaattctcttaccgttacaatgaacatcgtcatgagtcctctagtgaagtgcccaaggcttacatttacacttctttcagcgtcgttgacagagaaaaggaaatcaagcaagttatgcaacagttgaatgctttaggttttgaagctgtggatatctccgataacgaattggctaaatctcatggtagatacttggttggtggtgcttctaaggttcctaatgaaagaattatttcatttgaattccctgaaagaccaggtgccttgactaggttccttggaggcctaagcgattcttggaatcttactttattccattatagaaaccatggtgccgatatcggtaaggttttagctggtatttccgttcctccaagggaaaacttaaccttccaaaaattcttggaagatttaggctacacttatcatgatgaaactgataacactgtttatcaaaaattcttgaaatattaa

SEQ ID NO: 685 - DNA, 1185 bp, Saccharomyces cerevisiae
atgactctacaagaatctgataaatttgctaccaaggccattcatgccggtgaacatgtggacgttcacggttccgtgatcgaacccatttctttgtccaccactttcaaacaatcttctccagctaaccctatcggtacttacgaatactccagatctcaaaatcctaacagagagaacttggaaagagcagttgccgctttagagaacgctcaatacgggttggctttctcctctggttctgccaccaccgccacaatcttgcaatcgcttcctcagggctcccatgcggtctctatcggtgatgtgtacggtggtacccacagatacttcaccaaagtcgccaacgctcacggtgtggaaacctccttcactaacgatttgttgaacgatctacctcaattgataaaggaaaacaccaaattggtctggatcgaaaccccaaccaacccaactttgaaggtcaccgacatccaaaaggtggcagaccttatcaagaagcacgctgccggccaagacgtgatcttggttgtcgacaacaccttcttgtccccatatatctccaatccattgaacttcggtgcagacatcgttgtccactccgctacaaagtacatcaacggtcactcagacgttgtgctcggtgtcctggccactaataacaagccattgtacgagcgtctgcagttcttacaaaacgccattggtgctatcccatctcctttcgatgcttggttgacccacagaggtttgaagactttgcatctacgtgtcagacaagctgccctcagcgccaacaaaatcgctgaattcttggcagcagacaaggaaaacgttgtcgcagtcaactacccaggtttgaagacacaccctaactacgacgtagtgttaaagcaacaccgtgatgcccttggtggtggtatgatctccttcagaatcaagggtggtgctgaagctgcttccaagttcgcctcctccacaagactgttcacattggccgaatcccttggtggtatcgaatctctattggaagtgcccgctgtgatgacccacggtggtatcccaaaggaggccagagaggcctctggtgtttttgacgacttggttagaatctctgtcggtattgaagacactgacgatcttttggaagacatcaagcaagccttgaaacaagccaccaactaa

SEQ ID NO: 686 - DNA, 1524 bp, Saccharomyces cerevisiae
atgactaaatctgagcagcaagccgattcaagacataacgttatcgacttagttggtaacaccccattgatcgcactgaaaaaattgcctaaggctttgggtatcaaaccacaaatttatgctaagctggaactatacaatccaggtggttccatcaaagacagaattgccaagtctatggtggaagaagctgaagcttccggtagaattcatccttccagatctactctgatcgaacctacttctggtaacaccggtatcggtctagctttaatcggcgccatcaaaggttacagaactatcatcaccttgccggaaaaaatgtctaacgagaaagtttctgtcctaaaggctctgggtgctgaaatcatcagaactccaactgctgctgcctgggattctccagaatcacatattggtgttgctaagaagttggaaaaagagattcctggtgctgttatacttgaccaatataacaatatgatgaacccagaagctcattactttggtactggtcgcgaaatccaaagacagctagaagacttgaatttatttgataatctacgcgctgttgttgctggtgctggtactggtgggactattagcggtatttccaagtacttgaaagaacagaatgataagatccaaatcgttggtgctgacccattcggttcaattttagcccaacctgaaaacttgaataagactgatatcactgactacaaagttgagggtattggttatgattttgttcctcaggttttggacagaaaattaattgatgtttggtataagacagacgacaagccttctttcaaatacgccagacaattgatttctaacgaaggtgtcttggtgggtggttcttccggttctgccttcactgcggttgtgaaatactgtgaagaccaccctgaactgactgaagatgatgtcattgttgccatattcccagattccatcaggtcgtacctaaccaaattcgtcgatgacgaatggttgaaaaagaacaatttgtgggatgatgacgtgttggcccgttttgactcttcaaagctggaggcttcgacgacaaaatacgctgatgtgtttggtaacgctactgtaaaggatcttcacttgaaaccggttgtttccgttaaggaaaccgctaaggtcactgatgttatcaagatattaaaagacaatggctttgaccaattgcctgtgttgactgaagacggcaagttgtctggtttagttactctctctgagcttctaagaaaactatcaatcaataattcaaacaacgacaacactataaagggtaaatacttggacttcaagaaattaaacaatttcaatgatgtttcctcttacaacgaaaataaatccggtaagaagaagtttattaaattcgatgaaaactcaaagctatctgacttgaatcgtttctttgaaaaaaactcatctgccgttatcactgatggcttgaaaccaatccatatcgttactaagatggatttactgagctacttagcataa

SEQ ID NO: 687 - DNA, 1398 bp, Saccharomyces cerevisiae
atgccgatcaagagattagatacagttgtggtaaataccggctctcaaaatgaccaacattcagcctccgtgccaccggtgtatttgtcgactaccttcaaagtggacttgaataatgaagatgcacagaactacgattattccagatcgggaaacccgaccagaagtgtccttcaacaccagattggtaagctttatcgtgtcccacaggaaaacgtattagctgtgagcagtggtatgacggcgctagacgtcatcctgcgtgggctcgtcttacttaacggcactgacaaccatacgccaacaataatagccggcgatgatctttatggaggcacccaaaggctgctgaattttttcaagcaacagagtcatgcagtctctgttcatgtggacacttccgattttgaaaagttcaaaaccgttttccagtctttagataaagttgattgtgttcttctagagtctccgaccaatccgctttgcaaggttgtagatatccctagaatattacgttttgtgaaatgcatatctcccgacactacagttgtcgttgataatactatgatgagtggactcaattgtaatcctcttcaactgaatccaggctgcgatgtcgtatacgaatctgctaccaagtacttgaatggtcatcacgatttgatggggggtgttattatcagcaaaacaccagaaatagcctcgaagctttactttgtcattaattctacaggagctggattatccccaatggattcttggctacttgtgaggggcctaaaaactctaggagttagattatatcaacagcagagaaatgctatgatattggctcattggctagaaaattcatgcggattcaaacctaccagaacaaacaaggctacgaaaactagatttgttggattacgctccaacccggatttcaagctgcataaatcgttcaataatggcccaggtgccgtgttatccttcgaaacggggtccttcgaacattcaaagagactggtcagttccaaaaaactgagtatatgggctgtgacggtatctttcgggtgtgtaaattcgcttctatctatgccttgcaaaatgtcccatgcttccattgatcccgaattaaggaaagagagagattttcctgaagatttggttcgtctttgctgcggtatcgaaaatatagtagatttgaagaaagatttattagcggcgatggttgacgctgatattatagaagtaagagaaaatggcaaatatcttttcaacaaattgaataagaacctagctgtgaacactaccatcgatgacctgcataagcctttaagtatttacgaagaattttacaatcaagatctcatcagaaaggactcagaattgaatattaagagttcgaaattgtaa

SEQ ID NO: 688 - DNA, 2304 bp, Saccharomyces cerevisiae
atggttcaatctgctgtcttagggttcccaagaatcggtccaaacagagaattaaagaaggccactgaaggttactggaacggtaaaatcactgtcgatgaattattcaaggtcggtaaggatttgagaactcaaaactggaagttgcaaaaggaggctggtgttgatatcatcccatccaatgacttctccttttacgaccaagttttggatttgtctttgttgttcaatgtcattccagaccgttacactaagtacgatctatctccaatcgacactttgtttgctatgggtagaggtttacaaagaaaggccactgaaactgaaaaggctgtcgacgtcactgctttggaaatggttaaatggttcgactctaactaccattacgttagaccaactttctccaagaccactcaatttaagttgaacggccaaaagccagttgacgaatttttggaagccaaggagttaggtattcatactagacctgtcttgttgggtccagtttcttacttattcttgggtaaggctgacaaggattctctagatttggaaccattgtccctattggaacaattgttgcctctatacactgaaatcctatctaaattggcttctgctggtgccactgaagttcaaattgacgaacctgtcttagttttggacttgcctgccaacgcccaagccgccattaagaaggcttacacttacttcggtgaacaaagcaatctaccaaagattactttggctacttacttcggtaccgttgtccctaacttagacgccatcaagggcttgccagttgctgccttacacgttgactttgttagagctccagaacaatttgatgaagtcgttgccgccattggtaacaaacaaaccttgtccgttggtattgttgatggtagaaacatttggaagaatgatttcaagaagtcttccgctatcgttaacaaggctattgaaaagttgggtgctgacagagtcgttgttgccacttcttcttctctattgcacacaccagttgatttgaacaacgaaaccaagttggacgctgaaatcaagggctttttctctttcgccactcaaaaattggatgaagttgttgtgatcaccaagaacgtttccggtcaagacgttgctgctgccctagaagctaacgctaaatctgttgaatccagaggtaaatccaagtttatccacgatgctgccgttaaggccagagttgcctctatcgacgaaaaaatgtctactagagcagctccatttgaacaaagattgcctgaacaacaaaaagtcttcaacttgccattgttcccaacaacaactattggttccttccctcaaaccaaggacatcagaattaacagaaacaaattcaacaagggcaccatctctgctgaagaatatgaaaaattcatcaattctgaaattgaaaaggtcatcagattccaagaagaaattggtttggatgtcttagtccacggtgaaccagaaagaaacgatatggttcaatacttcggtgaacaaatcaacggttatgctttcactgttaacggttgggttcaatcttacggttccagatatgtcagaccaccaattattgttggtgacttgtccagaccaaaggctatgtccgtcaaggaatctgtttacgctcaatccatcacttctaagccagtaaagggtatgttgactggtccaattacctgtttgagatggtctttcccaagagacgatgtcgaccaaaaaactcaagctatgcaattagctttggctttgagagatgaagtcaatgatttggaagctgccggtatcaaggttatccaagttgatgaaccagctttaagagaaggtttaccattgagagaaggtactgagagatctgcttactacacctgggctgccgaagctttcagagttgctacttctggtgttgctaacaagactcaaatacactctcatttctgttactctgacttggatccaaaccatatcaaggctttggatgctgatgttgtttccatcgaattctctaagaaggacgatgctaactacattgctgaattcaaaaactatccaaaccacattggtctaggtttattcgatattcattctccaagaattccatcaaaggatgaatttatcgccaagatttcaaccatcttgaagagctacccagctgaaaagttctgggttaacccagattgtggtttgaagactagaggctgggaagaaactagattgtctttgactcatatggtcgaagccgccaagtacttccgtgaacaatacaagaattaa

SEQ ID NO: 689 - DNA, 1149 bp, Saccharomyces cerevisiae
atggccggtacatttttattcacttctgaatccgttggtgaaggtcacccagataagatctgtgaccaagtttccgacgccatcttggacgcttgtttagccgaggaccctcactccaaagttgcgtgtgaaaccgcggcaaagactggtatgattatggtctttggtgaaattactaccaaggcacagttggattaccaaaaaatcgtcagagacaccatcaagaagattggttacgatgattccgccaagggtttcgactataagacctgtaacgtccttgtcgccattgagcaacaatctccagatatcgcccaaggtgtccacgaggagaaggatttggaagacatcggtgccggtgaccaaggtatcatgtttggttacgccacagatgaaactccagagggtttgcctttgactattcttttggctcataaactaaacatggccatggctgacgcgagaagagatggctctttagcgtggttgagaccagacaccaagactcaagtcaccgtcgaatacaaggatgaccacggtagatgggttccacaaagaatcgacaccgtcgtcgtctccgctcaacatgctgacgaaatcacgaccgaggacttaagagcgcaactaaagtccgagatcattgaaaaagtcatcccaagagacatgttggacgaaaacaccaaatactttatccaaccttccggtagattcgtcatcggtggtcctcaaggtgacgctggtttgaccggtagaaagatcatcgtcgacgcttacggtggtgcctcatccgtcggtggtggtgccttctccggtaaggactactctaaggttgatcgttctgccgcttatgccgctagatgggttgccaagtccctagttgccgctggtttatgtaagagagttcaagttcaattttcttatgccatcggtattgcggaaccattgtccttgcacgttgacacctatggtactgcgaccaagtctgacgaagaaattatcgacattatcagcaagaactttgacttgagacctggtgtattggtcaaggagttggacttagctagaccaatctacttgccaaccgcttcttatggccatttcacaaaccaagaatacccatgggaaaagcctaagactttgaagttctaa

SEQ ID NO: 690 - DNA, 1155 bp, Saccharomyces cerevisiae
atgtccaagagcaaaactttcttatttacctctgaatccgtcggtgaaggtcacccagacaagatttgtgaccaagtttctgatgctattttggacgcttgtttagaacaagatccattctccaaggttgcctgtgaaacagctgccaaaactggtatgattatggttttcggtgaaattaccaccaaagctagacttgactaccaacaaatagtaagagataccatcaagaagattggttatgacgattctgccaagggtttcgactacaagacatgtaatgttttagtagctatcgaacaacaatctccagatatcgctcaaggtctgcactatgaaaagagcttagaagacttaggtgctggtgaccaaggtataatgtttggttacgctacagacgaaactccagaagggttaccattgaccattcttttggctcacaaattgaacatggctatggcagatgctagaagagatggttctctcccatggttgagaccagacacaaagactcaagtcactgtcgaatacgaagacgacaatggtagatgggttccaaagaggatagataccgttgttatttctgctcaacatgctgatgaaatttccaccgctgacttgagaactcaacttcaaaaagatattgttgaaaaggtcataccaaaggatatgttagacgaaaataccaaatatttcatccaaccatccggtagattcgtcatcggtggtcctcaaggtgacgctggtttgaccggtagaaagattattgtcgacgcttacggtggtgcctcatccgtcggtggtggtgccttctccggtaaggactattccaaggtcgatcgttccgctgcttacgctgctagatgggttgccaagtctctagttgccgctggtttgtgtaagagagtccaagtccaattttcatatgctattggtattgctgaaccattgtctttacatgtggacacctatggtacagctacaaaatcagatgacgaaatcattgaaattattaagaagaacttcgacttgagaccaggtgtgttagtaaaggaattagatttggctagaccaatttacttaccaaccgcttcttatggtcacttcactaatcaagagtactcatgggaaaaaccaaagaaattggaattttaa

SEQ ID NO: 691 - DNA, 1410 bp, Saccharomyces cerevisiae
atgacaagcattgacattaacaacttacaaaatacctttcaacaagctatgaatatgagcggctccccaggcgctgtttgtacttcacctacgcaatctttcatgaataccgttccacagcgcttgaatgctgtaaagcacccaaaaattttgaagcctttctcaacgggtgatatgaagattttactattagaaaacgttaatcaaactgctattacaatcttcgaagagcaaggttaccaagtcgaattctataaatcttcattgcccgaggaagagttgatcgaaaagatcaaggacgttcatgctattggtatcagatcaaagactagattaacttcaaatgtcttacaacatgcgaagaatctggtttgtattggttgtttctgtatcggtaccaaccaagttgacttagactacgctaccagcagaggtattgctgttttcaactcgcctttctccaactcaagatcagtagcagaattggtcatcgctgaaatcattagtttagcaagacaactaggtgatagatctatcgaattacataccggtacatggaataaggttgctgctagatgttgggaggtaagaggaaaaactcttggtattattgggtacggtcacattggttcccaattatcagttcttgcagaagctatgggtttgcatgtgttgtactacgatattgtaactatcatggccttgggtactgccagacaagtttctacattagatgaattgttgaataaatctgattttgtgacactacatgtaccagctactcctgaaactgaaaaaatgttatctgccccacaatttgctgctatgaaggatggcgcttatgttattaatgcttcaagaggtactgtcgtggacattccatctttgatccaagccgtgaaagccaacaaaattgcaggtgctgctttggatgtttatccacatgaaccagctaagaacggtgaaggttcatttaacgatgagctaaatagctggacttctgaattagtttcattaccaaatatcatcttgacaccacacattggtggctctaccgaagaagcccaaagctcaatcggtattgaagtggctaccgcattgtccaaatacatcaatgaaggtaactctgtcggttcagtcaacttcccagaagtggcattgaaatcattgtcttacgaccaagagaacactgtgcgtgtgttatacattcaccaaaatgtaccaggtgttttgaagaccgtcaatgatattttatcgaaccataacatcgaaaagcaattttccgattcaaatggtgaaattgcttatttaatggctgatatctcttctgttgaccaaagcgatattaaagatatttatgaacaactaaatcaaacctctgctaagatctcaattagattgctatattaa

SEQ ID NO: 692 - DNA, 1188 bp, Saccharomyces cerevisiae
atgtctttggaaagagaggaaccacaacatttcggagcagggccagctcaaatgcctacaccagttttgcaacaagctgctaaagacttaatcaatttcaatgacataggtttgggtatcggtgaaatttctcaccgttcgaaggatgccaccaaagtgattgaagactctaagaagcacttaatcgaactgctaaatattcctgacactcatgaagtgttctacttgcaaggtggtggcactactggtttttcttccgttgctactaatttggcagctgcatatgtgggtaagcatgggaagattgcacctgccggttatttagtcaccggtagttggtctcagaaatcttttgaagaggcaaagagattgcacgttcctgctgaagttatcttcaacgctaaagattataacaatggcaaatttggtaaaattccggatgaatccctttgggaagataaaatcaaaggtaaggctttctcatacgtgtacctatgtgagaatgaaactgttcatggtgttgaatggccagaattaccaaaatgtttagtaaacgaccccaacatcgaaattgttgctgacttatccagcgacattttgtctcgtaagattgacgtttctcaatacggtgtcatcatggcaggcgcccaaaaaaacattggtttagcaggcttaaccctatacattatcaagaaatccatccttaagaatatttctggcgcttctgatgaaacattacatgaattgggagtaccaatcacccctattgcattcgactatccaacggtggtgaagaacaactcagcctataatacaattccaattttcactttacatgttatggatctcgtgttccaacatattttgaagaagggtggtgttgaagcgcaacaggctgaaaatgaagaaaaggccaagatattatatgaggcattggatgcaaattcagatttttacaacgttccagtggatccaaagtgtagatcaaaaatgaatgtcgttttcacccttaaaaaggacggccttgatgaccagtttctaaaagaggcagctgctcgtcatttaaccggtttgaaaggacatcgttcagttggtgggttcagagcctccatctataacgcgctttcagtgaaagctgtacaaaacttggtagattttatcaaggaatttgctgagaaaaacgcttaa

SEQ ID NO: 693 - DNA, 930 bp, Saccharomyces cerevisiae
atgtcaaagtttgttatcacctgcatagctcatggagaaaatctcccaaaagaaaccatcgaccagattgcgaaagaaattactgaaagctcggcgaaagatgtatcaatcaatggtaccaagaaactatcggccagagctaccgatatattcattgaagtcgcaggatcgattgttcaaaaagacctcaagaataagctgacgaacgtcattgacagtcataatgatgttgatgttattgtttctgtcgacaatgaatatcgtcaagccaaaaagctctttgtctttgacatggattcaacattaatctaccaagaggtcatcgaattgattgccgcttatgctggtgttgaagaacaagtgcacgagatcacagaaagagccatgaacaatgaacttgatttcaaagagtctttaagagaacgcgttaaattattgcaaggcctccaagtcgatacactatatgatgaaataaaacaaaagctagaggtcaccaagggtgtgccagaactatgcaagttccttcacaaaaaaaattgcaagctcgctgttttaagcggtggttttattcagtttgccggttttatcaaggatcagttaggtttagatttttgtaaggcaaacttgttggaagttgacactgatggaaaattaaccggtaaaacactgggtcctatcgtagacggacagtgcaagagtgaaacccttctgcaactatgtaatgactacaatgttccagttgaagcaagttgtatggtgggtgacggtggtaacgacctgccagccatggctaccgccgggtttgggatcgcatggaacgccaagccaaaggtgcagaaagctgcaccttgtaagttgaataccaagagcatgactgacattttatacattcttggttacaccgatgatgaaatatacaatagacaatga

SEQ ID NO: 694 - DNA, 1410 bp, Saccharomyces cerevisiae
atgccttacactctatccgacgctcatcataagttgatcacctctcatttggtggacaccgaccctgaagtggactccattatcaaggatgaaattgaaagacaaaagcactccatcgatttgattgcttctgaaaatttcacctcaacctccgttttcgatgcccttggaactccattgtccaacaaatactctgaaggttatccaggtgctcgttactacggtggtaatgaacacattgacagaatggaaattctatgtcaacaaagagctttgaaagctttccatgttactccagacaaatggggtgttaacgtccaaactttatctggttctcctgctaacttgcaggtttatcaagctattatgaagcctcatgaaagattgatgggtctatacctaccagatggtggtcatttgtctcacggttacgctactgaaaacagaaaaatttctgctgtttccacatacttcgaatctttcccatacagagttaacccagaaaccggtattatcgactacgatactttagaaaagaacgccatcctatatagaccaaaggttcttgttgctggtacttcagcatactgtcgtttaattgactacaagagaatgagagaaatcgccgacaaatgtggtgcttacttgatggtagacatggcccacatttctggtttgatcgccgcaggtgtcatcccatctcctttcgaatacgctgatatcgttaccaccaccactcacaagtctttgagaggtccacgtggtgctatgattttcttcagaagaggtgtgagatctatcaaccctaagaccggtaaggaagttctatacgacttggaaaacccaattaacttctctgttttcccaggtcaccaaggtggtccacacaaccataccattgctgctttggccactgctttgaagcaagctgccactccagaattcaaggaataccaaactcaagtcttgaagaatgctaaggctttggaaagtgaatttaagaacttgggctacagattagtttccaacggtaccgattctcacatggttctagtatccttgagagaaaagggtgttgatggtgctcgtgttgaatacatttgtgaaaagattaacattgctttgaacaaaaactctattccaggtgacaaatctgctttggttccaggtggtgtccgtattggggctccagccatgaccactagaggaatgggtgaagaagatttccacagaattgttcaatacattaacaaggctgtagaattcgctcaacaagttcaacaaagcttgccaaaggatgcttgtagattaaaggacttcaaagccaaggtcgacgaaggctctgatgttttgaacacctggaaaaaggaaatttacgactgggctggcgaatacccattggctgtgtaa

SEQ ID NO: 695 - protein, 1164 aa, Saccharomyces cerevisiae
ATGACTGAATTCGAATTGCCTCCAAAATATATCACCGCTGCTAACGACTTGCGGTCAGACACATTCACCACTCCAACTGCAGAGATGATGGAGGCCGCTTTAGAGGCCTCTATCGGTGACGCTGTCTACGGTGAAGATGTTGACACCGTTAGGCTCGAACAGACCGTTGCCCGCATGGCTGGCAAAGAAGCAGGTTTGTTCTGTGTCTCTGGGACTTTGTCCAACCAGATTGCCATCAGAACTCACTTGATGCAACCTCCATACTCTATTCTATGTGATTACAGGGCTCACGTTTACACTCACGAAGCCGCTGGACTGGCGATCTTGTCTCAAGCGATGGTGGTTCCTGTGGTTCCTTCCAACGGTGACTACTTGACCTTGGAAGACATCAAGTCACACTACGTCCCAGACGACGGTGATATTCACGGTGCCCCCACCAGATTGATTTCTCTGGAAAACACTTTACACGGTATTGTTTATCCATTGGAAGAACTGGTCCGCATCAAAGCTTGGTGTATGGAAAATGGTCTCAAACTACATTGTGACGGTGCCAGAATCTGGAATGCCGCTGCACAATCTGGCGTGCCATTAAAGCAATATGGGGAAATCTTCGACTCCATCTCCATCTGTCTATCCAAGTCTATGGGTGCTCCTATTGGGTCCGTCTTGGTTGGGAACCTTAAGTTTGTCAAGAAGGCCACCCATTTCAGAAAACAACAAGGTGGTGGTATTAGACAATCTGGTATGATGGCTAGAATGGCTCTTGTAAACATCAACAACGATTGGAAGTCCCAATTGCTGTACTCGCACTCTTTGGCTCATGAATTAGCCGAATATTGTGAGGCAAAGGGCATCCCGCTAGAGTCTCCAGCAGACACCAACTTTGTCTTTATTAACCTGAAGGCCGCTAGAATGGACCCAGATGTCCTTGTTAAGAAGGGTTTGAAGTACAACGTTAAGCTAATGGGTGGTAGAGTCTCGTTCCACTATCAAGTCACCAGAGATACTTTGGAAAAAGTCAAATTGGCCATCTCCGAGGCCTTCGACTATGCTAAAGAACATCCTTTCGACTGTAACGGACCTACCCAGATTTACCGTAGTGAATCCACCGAGGTCGACGTTGATGGCAACGCTATCCGCGAAATAAAAACCTACAAATACTGA

SEQ ID NO: 696 - DNA, 930 bp, Saccharomyces cerevisiae
atgctgagatcgttattgcaaagcggccaccgcagggtggttgcttcttcatgtgctaccatggtgcgttgcagttcctcgtcgacctccgcgttggcgtacaagcagatgcacagacacgcaacaagacctcccttgcccacactagacactccttcctggaatgccaacagtgccgtttcatccatcatttacgaaacaccagcgccttctcgtcaaccaagaaaacagcatgtcttgaactgtttggtgcaaaacgaacccggtgtcttgtccagagtctcgggtacgttagctgccagaggctttaacatcgattcgttggtcgtgtgcaacaccgaggtcaaagacctaagtagaatgaccattgttttgcaagggcaagatggcgtagtcgaacaagcacgcagacaaatcgaagacttggtccccgtctacgccgtcctagactataccaattctgagatcatcaaaagagagctagtgatggccagaatctctctattgggtactgaatacttcgaagacctactattgcaccaccacacttccaccaatgctggcgccgctgactcccaagaattggtcgccgaaatcagagaaaagcaattccaccctgccaacttgcccgccagtgaggtattaaggttgaagcacgagcatttgaacgatatcaccaacttgaccaacaactttggaggtcgtgtcgtcgacatcagcgaaacaagctgtattgtggagttgtctgcaaaacccacacgtatctctgccttcttgaagttggtcgagccattcggtgtcctagagtgtgcaagaagcggtatgatggcattgccaagaactcctttgaagacaagcaccgaggaagctgccgacgaagacgaaaagatcagcgaaatcgtcgacatttcccaactaccacctggttag

SEQ ID NO: 697 - DNA, 2064 bp, Saccharomyces cerevisiae
atgatcagacaatctacgctaaaaaacttcgctattaagcgttgctttcaacatatagcataccgcaacacacctgccatgagatcagtagctctcgcgcagcgcttttatagttcgtcttcccgttattacagtgcgtctccattaccagcctctaaaaggccagagcctgctccaagtttcaatgttgatccattagaacagcccgctgaaccttcaaaattggctaagaaactacgcgctgagcctgacatggatacctctttcgtcggtttaactggtggtcaaatatttaacgaaatgatgtccagacaaaacgttgatactgtatttggttatccaggtggtgctatcctacctgtttacgatgccattcataacagtgataaattcaacttcgttcttccaaaacacgaacaaggtgccggtcacatggcagaaggctacgccagagcttctggtaaaccaggtgttgtcttggttacttctgggccaggtgccaccaatgtcgttactccaatggcagatgcctttgcagacgggattccaatggttgtctttacagggcaagtcccaactagtgctatcggtactgatgctttccaagaggctgacgtcgttggtatttctagatcttgtacgaaatggaatgtcatggtcaagtccgtggaagaattgccattgcgtattaacgaggcttttgaaattgccacgagcggtagaccgggaccagtcttggtcgatttaccaaaggatgttacagcagctatcttaagaaatccaattccaacaaaaacaactcttccatcaaacgcactaaaccaattaaccagtcgcgcacaagatgaatttgtcatgcaaagtatcaataaagcagcagatttgatcaacttggcaaagaaacctgtcttatacgtcggtgctggtattttaaaccatgcagatggtccaagattactaaaagaattaagtgaccgtgctcaaatacctgtcaccactactttacaaggtttaggttcattcgaccaagaagatccaaaatcattggatatgcttggtatgcacggttgtgctactgccaacctggcagtgcaaaatgccgacttgataattgcagttggtgctagattcgacgaccgtgtcactggtaatatttctaaattcgctccagaagctcgtcgtgcagctgccgagggtagaggtggtattattcatttcgaggttagtccaaaaaacataaacaaggttgttcaaactcaaatagcagtggaaggtgatgctacgaccaatctgggcaaaatgatgtcaaagattttcccagttaaggagaggtctgaatggtttgctcaaataaataaatggaagaaggaatacccatacgcttatatggaggagactccaggatctaaaattaaaccacagacggttataaagaaactatccaaggttgccaacgacacaggaagacatgtcattgttacaacgggtgtggggcaacatcaaatgtgggctgctcaacactggacatggagaaatccacatactttcatcacatcaggtggtttaggtacgatgggttacggtctccctgccgccatcggtgctcaagttgcaaagccagaatctttggttattgacattgatggtgacgcatcctttaacatgactctaacggaattgagttctgccgttcaagctggtactccagtgaagattttgattttgaacaatgaagagcaaggtatggttactcaatggcaatccctgttctacgaacatcgttattcccacacacatcaattgaaccctgatttcataaaactagcggaggctatgggtttaaaaggtttaagagtcaagaagcaagaggaattggacgctaagttgaaagaattcgtttctaccaagggcccagttttgcttgaagtggaagttgataaaaaagttcctgttttgccaatggtggcaggtggtagcggtctagacgagttcataaattttgacccagaagttgaaagacaacagactgaattacgtcataagcgtacaggcggtaagcactga

SEQ ID NO: 698 - DNA, 1188 bp, Saccharomyces cerevisiae
atgttgagaactcaagccgccagattgatctgcaactcccgtgtcatcactgctaagagaacctttgctttggccacccgtgctgctgcttacagcagaccagctgcccgtttcgttaagccaatgatcactacccgtggtttgaagcaaatcaacttcggtggtactgttgaaaccgtctacgaaagagctgactggccaagagaaaagttgttggactacttcaagaacgacacttttgctttgatcggttacggttcccaaggttacggtcaaggtttgaacttgagagacaacggtttgaacgttatcattggtgtccgtaaagatggtgcttcttggaaggctgccatcgaagacggttgggttccaggcaagaacttgttcactgttgaagatgctatcaagagaggtagttacgttatgaacttgttgtccgatgccgctcaatcagaaacctggcctgctatcaagccattgttgaccaagggtaagactttgtacttctcccacggtttctccccagtcttcaaggacttgactcacgttgaaccaccaaaggacttagatgttatcttggttgctccaaagggttccggtagaactgtcagatctttgttcaaggaaggtcgtggtattaactcttcttacgccgtctggaacgatgtcaccggtaaggctcacgaaaaggcccaagctttggccgttgccattggttccggttacgtttaccaaaccactttcgaaagagaagtcaactctgacttgtacggtgaaagaggttgtttaatgggtggtatccacggtatgttcttggctcaatacgacgtcttgagagaaaacggtcactccccatctgaagctttcaacgaaaccgtcgaagaagctacccaatctctatacccattgatcggtaagtacggtatggattacatgtacgatgcttgttccaccaccgccagaagaggtgctttggactggtacccaatcttcaagaatgctttgaagcctgttttccaagacttgtacgaatctaccaagaacggtaccgaaaccaagagatctttggaattcaactctcaacctgactacagagaaaagctagaaaaggaattagacaccatcagaaacatggaaatctggaaggttggtaaggaagtcagaaagttgagaccagaaaaccaataa

SEQ ID NO: 699 - DNA, 1758 bp, Saccharomyces cerevisiae
atgggcttgttaacgaaagttgctacatctagacaattctctacaacgagatgcgttgcaaagaagctcaacaagtactcgtatatcatcactgaacctaagggccaaggtgcgtcccaggccatgctttatgccaccggtttcaagaaggaagatttcaagaagcctcaagtcggggttggttcctgttggtggtccggtaacccatgtaacatgcatctattggacttgaataacagatgttctcaatccattgaaaaagcgggtttgaaagctatgcagttcaacaccatcggtgtttcagacggtatctctatgggtactaaaggtatgagatactcgttacaaagtagagaaatcattgcagactcctttgaaaccatcatgatggcacaacactacgatgctaacatcgccatcccatcatgtgacaaaaacatgcccggtgtcatgatggccatgggtagacataacagaccttccatcatggtatatggtggtactatcttgcccggtcatccaacatgtggttcttcgaagatctctaaaaacatcgatatcgtctctgcgttccaatcctacggtgaatatatttccaagcaattcactgaagaagaaagagaagatgttgtggaacatgcatgcccaggtcctggttcttgtggtggtatgtatactgccaacacaatggcttctgccgctgaagtgctaggtttgaccattccaaactcctcttccttcccagccgtttccaaggagaagttagctgagtgtgacaacattggtgaatacatcaagaagacaatggaattgggtattttacctcgtgatatcctcacaaaagaggcttttgaaaacgccattacttatgtcgttgcaaccggtgggtccactaatgctgttttgcatttggtggctgttgctcactctgcgggtgtcaagttgtcaccagatgatttccaaagaatcagtgatactacaccattgatcggtgacttcaaaccttctggtaaatacgtcatggccgatttgattaacgttggtggtacccaatctgtgattaagtatctatatgaaaacaacatgttgcacggtaacacaatgactgttaccggtgacactttggcagaacgtgcaaagaaagcaccaagcctacctgaaggacaagagattattaagccactctcccacccaatcaaggccaacggtcacttgcaaattctgtacggttcattggcaccaggtggagctgtgggtaaaattaccggtaaggaaggtacttacttcaagggtagagcacgtgtgttcgaagaggaaggtgcctttattgaagccttggaaagaggtgaaatcaagaagggtgaaaaaaccgttgttgttatcagatatgaaggtccaagaggtgcaccaggtatgcctgaaatgctaaagccttcctctgctctgatgggttacggtttgggtaaagatgttgcattgttgactgatggtagattctctggtggttctcacgggttcttaatcggccacattgttcccgaagccgctgaaggtggtcctatcgggttggtcagagacggcgatgagattatcattgatgctgataataacaagattgacctattagtctctgataaggaaatggctcaacgtaaacaaagttgggttgcacctccacctcgttacacaagaggtactctatccaagtatgctaagttggtttccaacgcttccaacggttgtgttttagatgcttga

SEQ ID NO: 700 - DNA, 1182 bp, Saccharomyces cerevisiae
atgttgcagagacattccttgaagttggggaaattctccatcagaacactcgctactggtgccccattagatgcatccaaactaaaaattactagaaacccaaatccatccaagccaagaccaaatgaagaattagtgttcggccagacattcaccgatcatatgttgaccattccttggtcagccaaagaagggtggggcactccacacatcaagccttacggtaatctttctcttgacccatctgcttgtgtattccattatgcatttgaattatttgaaggtttgaaagcctacagaactcctcaaaatactatcaccatgttccgtccggataagaacatggcccgtatgaacaagtctgccgctagaatttgtttgccaactttcgaatctgaagaattgatcaaacttaccgggaaattgatcgaacaagataaacacttggttcctcaaggtaatggttactcattatacatcagaccaacaatgattggtacatccaagggtttaggtgttggcactccctccgaggctcttctttatgttattacttctccagtcggtccttattataagactggtttcaaagccgtacgtcttgaagcaacagactatgctacaagagcttggccaggtggtgttggcgacaaaaaattgggtgctaactatgccccatgcatcttacctcaactacaagctgccaaaagagggtaccaacaaaatctatggttgttcggcccagaaaagaacatcactgaggttggtactatgaacgtgttcttcgttttcctcaacaaagtcactggcaagaaggaattggttaccgctccattagatggtaccattttagaaggtgttaccagagactctgttttaacattggctcgtgacaaactagatcctcaagaatgggacatcaacgagcgttattacactattactgaagtcgccactagagcaaaacaaggtgaactattagaagccttcggttctggtactgctgctgtcgtttcacctatcaaggaaattggctggaacaacgaagatattcatgttccactattgcctggtgaacaatgtggtgcattgaccaagcaagttgctcaatggattgctgatatccaatacggtagagtcaattatggtaactggtcaaaaactgttgccgacttgaactaa

SEQ ID NO: 701 - DNA, 1131 bp, Saccharomyces cerevisiae
atgaccttggcacccctagacgcctccaaagttaagataactaccacacaacatgcatctaagccaaaaccgaacagtgagttagtgtttggcaagagcttcacggaccacatgttaactgcggaatggacagctgaaaaagggtggggtaccccagagattaaaccttatcaaaatctgtctttagacccttccgcggtggttttccattatgcttttgagctattcgaagggatgaaggcttacagaacggtggacaacaaaattacaatgtttcgtccagatatgaatatgaagcgcatgaataagtctgctcagagaatctgtttgccaacgttcgacccagaagagttgattaccctaattgggaaactgatccagcaagataagtgcttagttcctgaaggaaaaggttactctttatatatcaggcctacattaatcggcactacggccggtttaggggtttccacgcctgatagagccttgctatatgtcatttgctgccctgtgggtccttattacaaaactggatttaaggcggtcagactggaagccactgattatgccacaagagcttggccaggaggctgtggtgacaagaaactaggtgcaaactacgccccctgcgtcctgccacaattgcaagctgcttcaaggggttaccaacaaaatttatggctatttggtccaaataacaacattactgaagtcggcaccatgaatgcttttttcgtgtttaaagatagtaaaacgggcaagaaggaactagttactgctccactagacggtaccattttggaaggtgttactagggattccattttaaatcttgctaaagaaagactcgaaccaagtgaatggaccattagtgaacgctacttcactataggcgaagttactgagagatccaagaacggtgaactacttgaagcctttggttctggtactgctgcgattgtttctcccattaaggaaatcggctggaaaggcgaacaaattaatattccgttgttgcccggcgaacaaaccggtccattggccaaagaagttgcacaatggattaatggaatccaatatggcgagactgagcatggcaattggtcaagggttgttactgatttgaactga

SEQ ID NO: 702 - DNA, 1365 bp, Saccharomyces cerevisiae; identical to SEQ ID NO: 650

SEQ ID NO: 703 - DNA, 1374 bp, Saccharomyces cerevisiae; identical to SEQ ID NO: 651

SEQ ID NO: 704 - DNA, 1113 bp, Saccharomyces cerevisiae
atggctgaagcaagcatcgaaaagactcaaattttacaaaaatatctagaactggaccaaagaggtagaataattgccgaatacgtttggatcgatggtactggtaacttacgttccaaaggtagaactttgaagaagagaatcacatccattgaccaattgccagaatggaacttcgacggttcttctaccaaccaagcgccaggccacgactctgacatctatttgaaacccgttgcttactacccagatcccttcaggagaggtgacaacattgttgtcttggccgcatgttacaacaatgacggtactccaaacaagttcaaccacagacacgaagctgccaagctatttgctgctcataaggatgaagaaatctggtttggtctagaacaagaatacactctatttgacatgtatgacgatgtttacggatggccaaagggtgggtacccagctccacaaggtccttactactgtggtgttggtgccggtaaggtttatgccagagacatgatcgaagctcactacagagcttgtttgtatgccggattagaaatttctggtattaacgctgaagtcatgccatctcaatgggaattccaagtcggtccatgtaccggtattgacatgggtgaccaattatggatggccagatactttttgcacagagtggcagaagagtttggtatcaagatctcattccatccaaagccattgaagggtgactggaacggtgccggttgtcacgctaacgtttccaccaaggaaatgagacaaccaggtggtacgaaatacatcgaacaagccatcgagaagttatccaagagacacgctgaacacattaagttgtacggtagcgataacgacatgagattaactggtagacatgaaaccgcttccatgactgccttttcttctggtgtcgccaacagaggtagctcaattagaatcccaagatccgtcgccaaggaaggttacggttactttgaagaccgtagaccagcttccaacatcgacccatacttggttacaggtatcatgtgtgaaactgtttgcggtgctattgacaatgctgacatgacgaaggaatttgaaagagaatcttcataa

SEQ ID NO: 705 - DNA, 6645 bp, Saccharomyces cerevisiae; identical to SEQ ID NO: 675

SEQ ID NO: 706 - DNA, 1725 bp, Saccharomyces cerevisiae
atgtggaggagaatattcgcgcatgaactcaagtatgatcaacccaatgcatcttcaaaaaacttgatcctttcagttctgaatacaaccgctacaaaacgagaggctaaggattatctctcaaaatatacaaatgatagtgggcagcataatcattgtttgttttttatcagggacctgcataaagtcgcaccagcgattttgtcccagttttcaagtgtcataaagagactaggaatgctaggtttgcgacctatgtttgtaattccgccgtcgccaactcatgtaaatatacaggcagagttacttgacagtatcgttacagaagcagatttaaagccacttcaccttaaggagggtcttactaaatcccgcactgggttatatcattctgttttttcgcaagagagtcgtttctttgatattggaaattccaattttataccaattgtgaaaccttatgtgtataatgaagagactgcttcagaattcatgacaaaggatgttgtaaaatttatggattgcctgtgccaagggaatattccacacattgacaaattcttcattctaaataatgccggaggtataccttcgggagagagaaatgataacgctcatgtattcatcaatctttctcaggaactcgagcatttgtcctcgtcattatctcacaatataagcactctaaccaaacgagagccacgctcccaaaacctgttacacagaatggaggtgtacgttaaaaaagatgagatatcttccttagaatgtgaataccatgatcatttagaaaacctgttattgatggacaaagttttatcaaatctagcggctacagcaacgggactgattacaactgtcaaagctgccgcactatcatcagataggaaaaatcctttagtatataatttattgacagaccgatcgctaatttcttcttctttaccaaggtttaaaaaaaaggacggcgagatagactcaccagccaacatgtttgatgatcacgcatggtatgaattgccttcccaacaggtaaatgcagctccttctaactcagatgcagttttagtgacaactgttctcaaaaagggcgtccatatcaaaacttatgactataagacgctgactcaattcaactcaattgggcttccaaagaagtttcacgtacctgagaaaggagcaaaaccctcgagcaatagtccaaaactagatatcaacaaatttaaatccatcatcgatcagagctttaaaagatctttggatttgcatgactacataaaaaggattaatggaaaaatagctacaattattgtgataggtgattatgaaggcattgcaattcttacctatgaaggctcggaggaaaattcctttgtttatctcgataagttcgccgttctaccacacttgaaaggctcgctgggtatatctgatataatcttcaatttgatgttcaaaaaatttcctaatgagatactttggagaagcagaaaagacaatgtggtgaacaagtggtattttcaacgtagcgttgctgtgctagatttgtcgattgacttagaccccgaacactgtgatgaaaagcaaagccaatttaaactattttactacggtaaccctcaatacgctaagagggcactacgtgacaagaaacgtttaagagaattcatgaggtctgtcagggacatcaagccaagttgggaaaatgaaaaaaatatttcatga

SEQ ID NO: 707 - DNA, 1272 bp, Saccharomyces cerevisiae
atgtttaaaagatatttatccagtacgtcatcaagaagatttacaagcattttagaggaaaaggcctttcaagtgaccacttactctagacctgaagatctatgtataactagaggtaaaaatgcaaagctgtatgatgacgtgaatggtaaagaatatatcgatttcaccgcaggtattgcggtgaccgcattaggccatgcaaatcctaaagtggcagaaattctgcaccatcaggctaacaaactggttcattcctccaacctttacttcactaaggaatgtttggatttaagtgaaaagattgttgaaaagaccaagcaattcggtggtcaacacgacgcctcaagagtatttttatgtaattctggtacggaagcaaatgaagctgctttgaagtttgcaaagaaacatggtataatgaaaaatcctagcaagcaaggcattgttgcatttgagaactcttttcatggccgtactatgggcgctttatctgtcacttggaatagtaaatatagaactccttttggggatttggttccccatgtctcattcttaaatttgaatgacgaaatgaccaaactacaaagttatatcgagaccaaaaaggacgagattgctggtttaattgtcgagcccatacaaggtgaaggtggggtttttcccgtagaagttgaaaagctaaccggattgaagaaaatatgtcaagataatgatgtgattgtcattcatgatgaaattcaatgcggtttgggccgttcaggtaaactatgggctcatgcttatttaccaagtgaggctcatccggatatttttacatctgccaaagcattgggaaatggcttccccatcgctgccaccatcgtcaatgaaaaagttaataatgctttgagagttggtgaccacggcaccacgtatggtggtaatccgctggcctgttctgtaagcaactatgttttggataccatagcagacgaagcttttttgaaacaagtctctaagaagagtgatatcttacaaaagcgcttgcgcgaaattcaagccaaatatccaaatcaaataaagactatcagaggaaaaggtttgatgcttggtgctgagttcgtcgaaccacccaccgaggtcatcaaaaaggccagagaattgggacttttgatcattaccgctggtaagagtaccgttagatttgttcccgcattaacgattgaagacgaactaatcgaagaagggatggatgcttttgaaaaggctattgaagcggtttacgcttaa

SEQ ID NO: 708 - DNA, 1017 bp, Saccharomyces cerevisiae
atgtcaaccacagcatccacgccttcatctttacgtcatttgatttctataaaagatctttctgatgaagaattcagaatcttagtacaaagagctcaacatttcaagaatgtttttaaagcaaataaaacgaatgatttccaatccaaccatctgaaactattgggtagaactatagccttaatatttactaaaagatcaactagaacgagaatttcgaccgaaggtgcagccaccttctttggtgcccaaccgatgtttttaggtaaagaggatattcagcttggtgtcaatgaatcattttacgataccaccaaggttgtatcatctatggtttcatgtatttttgcccgtgtgaacaaacatgaagacatacttgctttttgcaaggattcctctgtaccgatcatcaactctctatgtgacaaattccaccctttgcaagcaatttgtgatcttttaacaataatcgaaaacttcaatatatctctagatgaagtaaataagggaatcaattcaaaattgaagatggcatggattggtgatgccaataatgtcataaatgatatgtgcatcgcatgtctgaaattcggtataagtgtcagtatttccactccccccggtattgaaatggattccgatattgtcgatgaagcaaagaaagttgctgagagaaacggtgcgacatttgaattaacacacgactctttaaaggcctccaccaatgccaatatattagtaaccgatactttcgtttccatgggtgaagaatttgcgaaacaggccaagctgaaacaattcaaaggttttcaaatcaatcaagaacttgtctctgtggctgatccaaactacaaatttatgcattgtctgccaagacatcaagaagaagttagtgatgatgtcttttatggagagcattccatagtctttgaagaagcagaaaacagattatatgcagctatgtctgccattgatatctttgttaataataaaggtaatttcaaggacttgaaataa

SEQ ID NO: 709 - DNA, 1263 bp, Saccharomyces cerevisiae
atgtctaagggaaaagtttgtttggcttattctggtggtttagatacctccgtcattttggcttggctactagaccaaggctacgaagttgtagctttcatggctaatgtagggcaagaagaagatttcgatgccgccaaggaaaaggccttgaagatcggtgcctgcaagttcgtttgtgtggattgtcgtgaagattttgtcaaggatattctattcccagctgtacaggtcaacgctgtgtacgaagacgtttatctgttgggtacctctttggcaagacctgttattgccaaagcccaaattgacgtcgctaaacaggagggctgtttcgcggtctctcatggttgtaccggtaaaggtaatgatcaaatcagattcgaattgtcattttacgctctgaagccagacgttaagtgtattacaccatggagaatgcctgaatttttcgaaagatttgctggcagaaaggatttgttagactatgctgcacaaaagggtattcccgtcgcccaaaccaaggccaagccatggtctactgacgaaaaccaagcccacatttcttacgaggcaggtatcttggaagacccagataccaccccaccaaaggacatgtggaaattgatcgtcgatccaatggatgctccggaccaaccacaagatttgaccattgactttgaacgtggtcttccagtcaagttgacctacaccgacaacaagacttccaaggaagtttccgttaccaagcctttggatgttttcttggccgcatccaacttagcaagggccaacggtgttggtagaatcgatattgtagaagatcgttacattaacttgaaatccagaggttgttacgaacaggctccattgactgttttgagaaaagctcatgttgatttggaaggtttgactttagacaaagaagtccgtcaattgagagactcattcgtcacaccaaactactccagattgatatataacggtttcctacttcacccagagtgtgagtacatcagatctatgatccaaccatcccaaaatagcgttaacggtactgtcagggttagactgtataagggtaacgtcatcattctgggcagatctacaaagactgaaaagttgtacgatccgacagaatcctctatggatgagttgaccggtttcttacctaccgataccaccggtttcattgccatccaggccattagaattaaaaaatacggtgaatccaaaaaaaccaaaggtgaagagttgactttgtaa

SEQ ID NO: 710 - DNA, 1392 bp, Saccharomyces cerevisiae
atgtcagacggcactcaaaaactatggggtgggagattcactggtgaaaccgatcctttgatgcacctttacaatgcgtctcttccgtatgattataagatgtataaggcagatttagaaggaactaaagtatacacagcgggcttgcagaagttgggtcttctaacggagacagaattggcaaagatccatgaaggtttggctgaaatcaaaaaagaatgggacgctgacaaatttgtccgtcatccaaacgacgaggatatccatactgcgaatgaaagacgtcttggtgaactaattggccgcgatattgctggtaaagtccacaccggtagatcccgtaatgatcaagttgttaccgatttgagaatatactgtcgtgacattgtcaatgacaccctctttccagctttaaagggcttggttgaagttctaattaagagggccgaaggtgagatagatgtcttaatgccaggctacacacatttacaaagggcacaacctattagatggtctcattggttgagctcttatgcaacatacttcaccgaagattacaagagactgggtcaaatactacacagattgaatcaatcaccactgggtgcaggcgctcttgctggtcatccttacggcattgatagagaatttttggctgaaggtttgggtttcaatagtgtaattggtaactccttggttgctgtttctgatagagatttcatcgtggagttgatgttttggggaactttgttcatgaaccatatttctcgttttgctgaagatttgattatatattgtacagcagaatttggtttcatacagttgagcgacgcctattcaacaggttcttctttaatgcctcagaagaagaatgcagactcgttagagttgttaagaggtaaatccggtagagtatttggtgatctgacaggattcttgatgagtttgaagggtatcccatctacttatgataaagacatgcaagaagacaaagagccactattcgattgcttaacaactgtagagcactccatgctgattgccacaggtgttatttctaccttaactgtaaataaggaaaagatggaagctgctctcacgatggatatgctagctaccgacttggcagattacttggtcagaaagggtgttccattcagagagactcatcacatatctggtgagtgtgtcgctactgctgaaagacttggtctaagcggtattgataaattaaccttggagcagtatcaaaagatcgattcgagattcggacaagatctttttgaaacttttaactttgaacaaagcgttgaaagacgagatgctactggtggaaccgctaaatctgctgtattgaagcaattggataatttgaaatcccaattaaattag

SEQ ID NO: 711 - DNA, 1401 bp, Saccharomyces cerevisiae
atgtctagtactcaagtaggaaatgctctatctagttccactactactttagtggacttgtctaattctacggttacccaaaagaagcaatattataaagatggcgagacgctgcacaatcttttgcttgaactaaagaataaccaagatttggaacttttaccgcatgaacaagcgcatcctaaaatatttcaagcgctcaaggctcgtattggtagaattaataatgaaacgtgcgaccccggtgaggagaactcgtttttcatatgcgatttgggagaagtcaagagattattcaacaactgggtgaaggagcttcctagaattaagccattttatgccgtcaaatgtaatcctgataccaaggttttgtcattattagcagagttgggcgttaatttcgattgcgcttccaaagtggaaattgacagagtattatcgatgaacatctcgccggatagaattgtttacgctaatccttgtaaagtagcatctttcattagatatgcagcttcaaaaaatgtaatgaagtctacttttgacaatgtagaagaattgcataaaatcaaaaagtttcatcctgagtctcagttgttattaagaatcgctaccgatgactctaccgctcaatgtcgactttccaccaaatatggctgtgaaatggaaaacgtagacgttttattaaaggctataaaggaactaggtttaaacctggctggtgtttctttccacgtcggttcaggcgcttctgattttacaagcttatacaaagccgttagagatgcaagaacggtatttgacaaagctgctaacgaatacgggttgccccctttgaagattttggatgtaggtggtggatttcaatttgaatccttcaaagaatcaactgctgttttgcgtctagcgctagaggaatttttccctgtaggttgtggtgttgatataattgcagagcctggcagatactttgtagctacagcgttcactttggcatctcatgtgattgcgaagagaaaactgtctgagaatgaagcaatgatttacactaacgatggtgtatacgggaacatgaattgtattttattcgatcatcaagagccccatccaagaaccctttatcataatttggaatttcattacgacgattttgaatccactactgcggtcctcgactctatcaacaaaacaagatctgagtatccatataaagtttccatctggggacccacatgtgatggtttggattgtattgccaaagagtattacatgaagcatgatgttatagtcggtgattggttttattttcctgccctgggtgcctacacatcatcggcggctactcaattcaacggctttgagcagactgcggatatagtatacatagactctgaactcgattga

SEQ ID NO: 712 - DNA, 882 bp, Saccharomyces cerevisiae
atggcacaagaaatcactcacccaactattgtagacggctggttcagagaaatttctgataccatgtggccaggccaggccatgactttaaaagtggagaaagttttacaccatgagaagtcaaaatatcaagacgttttgatcttcaaatccactacatatggtaatgttctagttttagataatgtaattcaagccaccgaaagggatgaatttgcctaccaagaaatgattgcccatcttgccttgaattcccatccaaatcctaagaaggttcttgttattggtgggggtgatggtggtgttttgagagaggttgtcaagcatgattccgttgaggaagcctggttatgtgacattgatgaagctgttattagactatcaaaggagtacctaccagaaatggctgcctcttattctcacccaaaggttaagacccacattggtgatggtttccaatttttaagagattaccaaaacacatttgacgtaatcattactgactcttctgacccagaaggtccagctgaaacccttttccaaaaggaatatttccaattgttgaacagtgcgttgacagaaaagggtgtaatcactacacaagcagaaagtatgtggattcacttgccaatcattaaggacttaaagaaagcctgttctgaagttttcccagttgcagaatactctttcgttactattccaacttacccaactggtacgattggttttatggtttgctccaaagataaaacttgcaatgtcaagaagccactacgtgaaatctctgatgagaaggaggctgaattatacagatactataacaagaaaattcacgaagcttcctttgttctaccaacctgggcagccaaggaattaaattag

SEQ ID NO: 713 - DNA, 1191 bp, Saccharomyces cerevisiae
atgactgtcaccataaaagaattgactaaccacaactacattgaccacgaactatcagccactttagactcaacggatgcgttcgagggtcccgagaagttgctggaaatctggttcttccctcacaagaagtccatcacgaccgaaaagacattaagaaatattggcatggatagatggatcgagattttgaaattagtgaaatgcgaagttctttccatgaagaagactaaagaactggatgcctttttgttgagtgagtcttccctcttcgtcttcgatcacaaattgacgatgaagacgtgcggtactacaaccacattgttctgtctcgaaaagcttttccagatcgttgagcaagagttatcgtgggctttccgcacaacacaagggggcaagtacaaaccatttaaagtgttttattctagacgatgtttccttttcccctgtaagcaagccgctatccatcaaaactgggctgacgaagtcgactatttgaacaaatttttcgacaatggtaaaagttattccgtgggaagaaatgacaagagcaaccactggaacctgtacgtcaccgagacggaccgctccacacctaagggaaaggagtacatcgaggatgacgacgaaactttcgaagtactgatgacggagctggacccagaatgcgctagtaagtttgtttgcgggcctgaggcatccacaaccgctctcgtggagccaaacgaagataagggccacaacctcggctaccaaatgactaaaaatacaaggcttgacgaaatatatgtcaactcggcccaagactccgatttatcatttcaccacgatgcatttgcgttcacgccatgtggatactcatccaatatgattctcgctgaaaaatactattacaccctgcacgtgactccggaaaagggttggtcttacgcctctttcgaaagtaacatacccgtatttgacatttcccaagggaagcaagacaacttggacgttcttctacatattctgaacgtttttcaaccaagagagttctcgatgaccttttttaccaaaaattatcagaaccaatccttccaaaaactactaagcatcaacgagtcactgcccgactacatcaagttagacaaaattgtttatgatctggacgactaccaccttttctatatgaaattgcagaagaaaatatga

SEQ ID NO: 714 - DNA, 1494 bp, Saccharomyces cerevisiae; identical to SEQ ID NO: 652

SEQ ID NO: 715 - DNA, 1416 bp, Saccharomyces cerevisiae
atgtctatttgtgaacaatactacccagaagagccaaccaaaccaactgttaagaccgagtccattcctggtcctgaatcccagaagcagttaaaggaactgggtgaagtttttgacacaagaccagcatattttttggctgattatgagaaatctttaggtaactatatcactgatgtggatgggaacacatatttggatttgtatgcccaaatctcttcaattgcacttggttataacaaccctgctttgatcaaggcagcacaatcaccagaaatgatccgtgctttggtcgaccgtcctgccttaggtaacttcccatctaaggatttagacaagatattgaagcaaatattgaaatctgcgccaaagggtcaagatcacgtctggtcagggctttccggtgcagatgccaatgaattagcgttcaaggctgcctttatttattaccgtgccaaacaaaggggctatgatgccgatttttctgaaaaggaaaacttgtctgtcatggacaatgacgcccctggcgcccctcatcttgccgtactatcgttcaagagagcgttccacggtagattgtttgcctccggttccacaacttgttctaaaccaattcacaagttggatttcccagccttccactggcctcatgctgagtatccatcttaccaatacccattagatgaaaattctgatgcaaaccgtaaagaggatgaccattgcttggccattgttgaagaattaatcaaaacctggtctattccagttgctgccttaatcatcgaaccaattcaatctgagggaggtgataaccacgcttctaagtatttcttacaaaagctaagagacattaccttgaagtataacgttgtctacatcatagatgaagtgcaaacaggtgtcggagccaccggtaagctatggtgtcatgagtacgccgatattcaaccacctgtggatttagtgaccttttccaagaaattccaaagtgcaggatatttcttccacgaccctaaattcattccaaacaaaccatacagacaattcaacacatggtgtggtgaacctgcaagaatgatcattgcaggtgccattggacaggaaatctccgacaagaagttgactgaacaatgttcaagagtaggtgattatttgttcaagaaattggagggtttgcagaagaaataccctgaaaactttcaaaacttgagaggtaaaggaagaggcacattcattgcctgggatttgcctactggtgagaagagagacttactattgaagaaattgaagttgaatggttgcaacgttggtggatgtgcagtccatgcagtgagattaagaccttcattaacattcgaggagaagcatgctgatatctttattgaagcattagccaaatcagttaatgaattatga

SEQ ID NO: 716 - DNA, 1323 bp, Saccharomyces cerevisiae; identical to SEQ ID NO: 648

SEQ ID NO: 717 - DNA, 1287 bp, Saccharomyces cerevisiae; identical to SEQ ID NO: 649

SEQ ID NO: 718 - DNA, 2082 bp, Saccharomyces cerevisiae
atgctacgatcaaccacatttactcgttcgttccacagttctagggcctggttgaaaggtcagaacctaactgaaaaaattgttcagtcgtatgcggtcaaccttcccgagggtaaagttgtgcattctggtgactatgtatcgatcaagccggcacactgtatgtcccacgataattcgtggcctgtagctttgaaattcatggggcttggcgctaccaagatcaagaatccttcacagattgtgaccactctggaccacgatattcagaacaaatcagagaaaaatttgaccaagtacaagaacatcgaaaattttgctaagaaacaccatatagaccactaccctgccggtagaggtattggtcatcaaattatgattgaggagggctatgctttccccttgaacatgactgtcgcatctgactcgcattcaaacacctacggtggtctggggtcgctgggcactccaatagtgagaacagacgctgcagccatatgggccacgggacagacgtggtggcagatcccaccagtggctcaggttgagttgaaaggtcaattgcctcagggtgtttccggaaaagatatcattgtcgcattatgtgggcttttcaacaatgatcaagttctaaatcacgccattgaattcacgggtgactctttgaatgcattgcctatcgatcacagactcactattgctaacatgaccaccgagtggggggctctttctggtttgttccccgtggacaaaactttgatcgactggtataaaaaccgtttgcaaaagctgggcaccaataatcatccaaggattaatccaaagactatccgcgcactagaagaaaaggcgaagattccgaaagcagacaaggatgcacattatgccaagaaactgatcatcgatctagccacgctaactcactacgtctcaggtccaaatagtgttaaggtctccaacaccgtgcaagatctatctcaacaagacatcaagataaataaagcttatctagtgtcatgtacaaactcccgtctatctgatttgcaatctgcagcggatgtggtttgtcctactggagacttaaacaaagtcaacaaggtggctccaggtgtggagttctatgtcgctgctgcctcttcagaaattgaggctgatgcccgtaaatcaggcgcttgggaaaagctgctaaaggctggctgtatcccactgccttctggttgtggtccatgcatcggtctaggtgcgggattactggaaccaggtgaagttggtatcagtgccacaaacagaaacttcaaaggtagaatgggttccaaggatgcattggcttacttagcttcccctgctgtagtcgccgcttctgccgtgctgggtaagattagttctcctgctgaggtattgtccacaagcgaaattccattcagcggcgttaagactgagataattgagaatcccgtggttgaagaggaagttaacgctcaaacagaggctccaaaacaatccgttgagatattagaaggtttcccaagagagttttctggtgaattagttttatgtgatgccgataacatcaataccgatggtatatatcctggtaagtacacttatcaggatgatgtgcctaaagaaaagatggcgcaagtttgtatggaaaattatgatgccgagttcagaaccaaggttcatccaggtgatatagtggtcagtgggttcaatttcggtaccggttcctccagggaacaagcggccaccgccttattggctaaaggtatcaacttagttgtttcaggatcttttggtaatattttttcaagaaactccattaacaatgctcttctgaccttggaaatcccagcattaatcaaaaaattacgtgagaaatatcaaggtgctccaaaagaacttacaagaagaactggttggtttttgaaatgggatgtagctgatgctaaagtggtcgttaccgaaggttctttggacggccctgtgatcttggagcaaaaagtgggtgagctaggtaagaacctacaagaaattattgtaaaaggaggcttggaaggttgggtcaaatcccaactataa

SEQ ID NO: 719 - DNA, 1116 bp, Saccharomyces cerevisiae
atgtttagatctgttgctactagattatctgcctgccgtgggttagcatctaacgctgctcgcaaatcactcactattggtcttatccccggtgacggtatcggtaaggaagtcattcctgctggtaagcaagttttggaaaaccttaactccaagcacggcctaagcttcaactttattgatctctacgccggtttccaaacattccaagaaacaggaaaggcgttgcctgatgagactgttaaagtgttgaaggaacaatgtcaaggtgctcttttcggtgcagttcagtctccaactactaaggtggaaggttactcctcaccaattgttgctctaaggagggaaatgggccttttcgctaatgttcgtcctgttaagtctgtagagggagaaaagggtaaaccaattgacatggttatcgtcagagaaaatactgaggacctgtacattaaaattgaaaaaacatacattgacaaggccacaggtacaagagttgctgatgccacaaagagaatatccgaaattgcaacaagaagaattgcaaccattgcattagatattgccttgaaaagattacaaacaagaggccaagccactttgacagtgactcataaatcaaatgttctatctcaaagtgatggtctattcagagaaatctgtaaggaagtctacgaatctaacaaggacaagtacggtcaaatcaaatataacgaacaaattgtggattccatggtttataggctgttcagagaaccacaatgttttgatgtgatagtggcaccaaacctatacggggatatattatctgacggtgctgctgctttagtcggttcattaggtgttgttccaagcgccaacgtaggtccagaaattgtcattggtgaaccatgccatggttctgcaccagatattgctggtaaaggtattgctaacccaatcgccactataagatctactgctttgatgttggaattcttgggccacaacgaagctgcccaagatatctacaaggctgttgatgctaacttaagagagggttctatcaagacaccagatttaggtggtaaggcttctactcaacaagtcgttgacgacgttttgtcgagattatag

SEQ ID NO: 720 - DNA, 4179 bp, Saccharomyces cerevisiae
atgactaacgaaaaggtctggatagagaagttggataatccaactctttcagtgttaccacatgactttttacgcccacaacaagaaccttatacgaaacaagctacatattcgttacagctacctcagctcgatgtgcctcatgatagtttttctaacaaatacgctgtcgctttgagtgtatgggctgcattgatatatagagtaaccggtgacgatgatattgttctttatattgcgaataacaaaatcttaagattcaatattcaaccaacgtggtcatttaatgagctgtattctacaattaacaatgagttgaacaagctcaattctattgaggccaatttttcctttgacgagctagctgaaaaaattcaaagttgccaagatctggaaaggacccctcagttgttccgtttggcctttttggaaaaccaagatttcaaattagacgagttcaagcatcatttagtggactttgctttgaatttggataccagtaataatgcgcatgttttgaacttaatttataacagcttactgtattcgaatgaaagagtaaccattgttgcggaccaatttactcaatatttgactgctgcgctaagcgatccatccaattgcataactaaaatctctctgatcaccgcatcatccaaggatagtttacctgatccaactaagaacttgggctggtgcgatttcgtggggtgtattcacgacattttccaggacaatgctgaagccttcccagagagaacctgtgttgtggagactccaacactaaattccgacaagtcccgttctttcacttatcgcgacatcaaccgcacttctaacatagttgcccattatttgattaaaacaggtatcaaaagaggtgatgtagtgatgatctattcttctaggggtgtggatttgatggtatgtgtgatgggtgtcttgaaagccggcgcaaccttttcagttatcgaccctgcatatcccccagccagacaaaccatttacttaggtgttgctaaaccacgtgggttgattgttattagagctgctggacaattggatcaactagtagaagattacatcaatgatgaattggagattgtttcaagaatcaattccatcgctattcaagaaaatggtaccattgaaggtggcaaattggacaatggcgaggatgttttggctccatatgatcactacaaagacaccagaacaggtgttgtagttggaccagattccaacccaaccctatctttcacatctggttccgaaggtattcctaagggtgttcttggtagacatttttccttggcttattatttcaattggatgtccaaaaggttcaacttaacagaaaatgataaattcacaatgctgagcggtattgcacatgatccaattcaaagagatatgtttacaccattatttttaggtgcccaattgtatgtccctactcaagatgatattggtacaccgggccgtttagcggaatggatgagtaagtatggttgcacagttacccatttaacacctgccatgggtcaattacttactgcccaagctactacaccattccctaagttacatcatgcgttctttgtgggtgacattttaacaaaacgtgattgtctgaggttacaaaccttggcagaaaattgccgtattgttaatatgtacggtaccactgaaacacagcgtgcagtttcttatttcgaagttaaatcaaaaaatgacgatccaaactttttgaaaaaattgaaagatgtcatgcctgctggtaaaggtatgttgaacgttcagctactagttgttaacaggaacgatcgtactcaaatatgtggtattggcgaaataggtgagatttatgttcgtgcaggtggtttggccgaaggttatagaggattaccagaattgaataaagaaaaatttgtgaacaactggtttgttgaaaaagatcactggaattatttggataaggataatggtgaaccttggagacaattctggttaggtccaagagatagattgtacagaacgggtgatttaggtcgttatctaccaaacggtgactgtgaatgttgcggtagggctgatgatcaagttaaaattcgtgggttcagaatcgaattaggagaaatagatacgcacatttcccaacatccattggtaagagaaaacattactttagttcgcaaaaatgccgacaatgagccaacattgatcacatttatggtcccaagatttgacaagccagatgacttgtctaagttccaaagtgatgttccaaaggaggttgaaactgaccctatagttaagggcttaatcggttaccatcttttatccaaggacatcaggactttcttaaagaaaagattggctagctatgctatgccttccttgattgtggttatggataaactaccattgaatccaaatggtaaagttgataagcctaaacttcaattcccaactcccaagcaattaaatttggtagctgaaaatacagtttctgaaactgacgactctcagtttaccaatgttgagcgcgaggttagagacttatggttaagtatattacctaccaagccagcatctgtatcaccagatgattcgtttttcgatttaggtggtcattctatcttggctaccaaaatgatttttaccttaaagaaaaagctgcaagttgatttaccattgggcacaattttcaagtatccaacgataaaggcctttgccgcggaaattgacagaattaaatcatcgggtggatcatctcaaggtgaggtcgtcgaaaatgtcactgcaaattatgcggaagacgccaagaaattggttgagacgctaccaagttcgtacccctctcgagaatattttgttgaacctaatagtgccgaaggaaaaacaacaattaatgtgtttgttaccggtgtcacaggatttctgggctcctacatccttgcagatttgttaggacgttctccaaagaactacagtttcaaagtgtttgcccacgtcagggccaaggatgaagaagctgcatttgcaagattacaaaaggcaggtatcacctatggtacttggaacgaaaaatttgcctcaaatattaaagttgtattaggcgatttatctaaaagccaatttggtctttcagatgagaagtggatggatttggcaaacacagttgatataattatccataatggtgcgttagttcactgggtttatccatatgccaaattgagggatccaaatgttatttcaactatcaatgttatgagcttagccgccgtcggcaagccaaagttctttgactttgtttcctccacttctactcttgacactgaatactactttaatttgtcagataaacttgttagcgaagggaagccaggcattttagaatcagacgatttaatgaactctgcaagcgggctcactggtggatatggtcagtccaaatgggctgctgagtacatcattagacgtgcaggtgaaaggggcctacgtgggtgtattgtcagaccaggttacgtaacaggtgcctctgccaatggttcttcaaacacagatgatttcttattgagatttttgaaaggttcagtccaattaggtaagattccagatatcgaaaattccgtgaatatggttccagtagatcatgttgctcgtgttgttgttgctacgtctttgaatcctcccaaagaaaatgaattggccgttgctcaagtaacgggtcacccaagaatattattcaaagactacttgtatactttacacgattatggttacgatgtcgaaatcgaaagctattctaaatggaagaaatcattggaggcgtctgttattgacaggaatgaagaaaatgcgttgtatcctttgctacacatggtcttagacaacttacctgaaagtaccaaagctccggaactagacgataggaacgccgtggcatctttaaagaaagacaccgcatggacaggtgttgattggtctaatggaataggtgttactccagaagaggttggtatatatattgcatttttaaacaaggttggatttttacctccaccaactcataatgacaaacttccactgccaagtatagaactaactcaagcgcaaataagtctagttgcttcaggtgctggtgctcgtggaagctccgcagcagcttaa

SEQ ID NO: 721 - DNA, 1341 bp, Saccharomyces cerevisiae
atgggaaagaacgttttgttgctaggatctggttttgttgcacaacctgttatcgacacattggctgctaatgatgacatcaatgtcactgtcgcatgtagaacattagccaatgcgcaagcattggccaagccctctggatccaaggctatttcattggatgttaccgatgacagtgccttagacaaagttctggctgataacgatgttgtcatctctttgattccatacaccttccatccaaatgtggtaaagagcgccatcagaacaaagaccgatgtcgtcacttcctcttacatctcacctgccttaagagaattggaaccagaaatcgtaaaggcaggtattacagttatgaacgaaattgggttggatccaggtatcgaccacttgtatgcggtcaagactattgatgaagttcacagagctggtggtaagctaaagtcattcttgtcatactgtggtggtttaccagctcctgaagactctgataatccattaggatacaaattttcatggtcctccagaggtgtgctactggctttaagaaactctgctaaatactggaaagacggaaagattgaaactgtttcttccgaagacttaatggccactgctaagccttacttcatctacccaggttatgcattcgtttgctacccaaatagagactctacccttttcaaggatctttatcatattccagaagccgaaacggtcattagaggtactttgagatatcaaggtttcccagaatttgttaaggctttagttgacatgggtatgttgaaggatgatgctaacgaaatcttcagcaagccaattgcctggaacgaagcactaaaacaatatttaggtgccaagtctacttctaaagaagatttgattgcttccattgactcaaaggctacttggaaagatgatgaagatagagaaagaatcctttccgggtttgcttggttaggcttgttctctgacgcaaagatcacaccaagaggtaatgctttagacactctatgtgcacgtttagaagaactaatgcaatatgaagacaatgaaagagatatggttgtactacaacacaaattcggtattgaatgggctgatggaactaccgaaacaagaacatccactttagttgactatggtaaggttggtggttacagttctatggccgctactgttggttatccagttgccattgcaacgaaattcgtcttagatggtacaatcaagggaccaggcttactagcgccatactcaccagagattaatgatccaatcatgaaagaactaaaggacaagtacggcatctatctaaaggaaaagacagtggcttaa

SEQ ID NO: 722 - DNA, 1122 bp, Saccharomyces cerevisiae
atggctgccgtcacattacatctaagagctgaaactaaacccctagaggcacgtgctgccttaacacctaccacggttaaaaaactgatagctaagggcttcaaaatatatgtagaggacagtccacaatctactttcaatattaacgaatatcgtcaagcaggtgccattatagtgcctgcaggttcatggaaaaccgctccacgcgacagaatcattataggtttgaaggaaatgcctgaaaccgatactttccctctagtccacgaacacatccagtttgctcactgctacaaagaccaagctgggtggcaaaatgtccttatgagatttattaagggacacggtactctatatgatttggaatttttggaaaatgaccaaggtagaagagttgctgcctttggattttacgctgggttcgcaggtgcagcccttggtgtaagagactgggcattcaagcaaacgcattctgacgatgaagacttgcctgcagtgtcgccttaccccaatgaaaaggcattggttaaagatgttaccaaagattataaagaagccttagccaccggagccagaaagccaaccgtgttaatcattggtgcgctaggaagatgtggttccggtgccatcgatctgttgcacaaagttggtattccagatgctaacatattaaaatgggatatcaaagaaacttcccgtggtggtccctttgacgaaattccacaagctgatatttttatcaattgtatatatctatcgaagccaattgctcctttcactaacatggagaaactgaataatcctaacagaagactaaggaccgtggtggacgtatcagcagacactaccaaccctcacaaccccatcccaatatacactgtggctactgtgtttaacaaacctaccgttctggtacctaccactgccgggcctaaattatctgtcatctctattgatcacttgccttctttgctgccaagagaagcttcagaatttttctctcatgatctcttaccatctttagagctcctacctcaaagaaaaactgctcctgtctgggttagagccaagaaattgttcgatagacattgcgctcgtgttaaaagatcttcaagattgtag

SEQ ID NO: 723 - DNA, 1533 bp, Saccharomyces cerevisiae
atgtgtggtattttaggtattgtattagcaaaccaaaccactccagtagctccggagttatgtgatggatgcatttttctacaacatcgtggacaagatgcagctggtatagctacctgtggttctcgtggtagaatctaccaatgtaaaggtaatggtatggctcgtgacgtatttacccaacaacgtgtttccggtcttgctggttccatgggtattgcccacttgagatatcctacagccgggtcttcggctaattcagaagcgcaaccattttacgtcaatagtccttacggtattaacttggcacataacggtaacttggtgaatactgcatcattgaagagatatatggatgaagacgttcatagacatattaacacggacagtgattcggagttactattgaatatttttgctgctgaactggaaaaacataacaagtacagagttaacaatgaagatgttttccacgcgttagaaggtgtttaccgtttatgccgtggcggttatgcttgcgttggtttacttgccggttttgcattatttggtttcagagatccaaatggtattaggccattattgttcggtgaaagagaaaatccggacggcactaaggactatatgttagcttcagaaagtgttgttttcaaagctcacaactttactaaatatcgtgacttaaagcctggcgaggcagttatcatccctaagaactgtagcaaaggtgaacctgagttcaaacaagtggttcctattaactcttatagacctgatttatttgaatacgtatatttcgccagaccggacagtgtcttggatggaatatcagtttatcacacaagattggctatgggttctaaattagcggaaaatattctaaagcaactgaagccagaagatattgatgttgttattcccgtcccagatactgcaagaacatgtgcactagaatgtgctaatgtgttagggaagccttatagagagggctttgttaaaaacagatacgtgggcaggacatttatcatgccaaaccagagggaaagggtttcttcagtaaggaggaagcttaaccctatggagtctgaatttaagggtaagaaggttctgatagtggatgattctattgtcagaggtactacttcaaaagagattgttaacatggccaaggaatccggtgcaacaaaggtttacttcgcttcagctgccccagccattcgttacaaccatatttatggtattgacttaacagacacaaagaacttgattgcttataacagaaccgatgaagaagtggcggaagtaatcggttgtgaaagagtcatttaccaatcattggaagatttgattgattgttgtaaaactgataaaataaccaaattcgaagatggtgtatttaccggaaattatgtcactggtgttgaagacggttatattcaagaattggaagaaaaacgtgaatcgatcgcaaataattcatcagatatgaaggctgaagtcgatatcggattatataattgtgcagattattga

SEQ ID NO: 724 - DNA, 645 bp, Saccharomyces cerevisiae
atggccagaattgtcgtattaatttcgggctcaggttccaacttgcaagccttgatcgatgcccaaaagcagggccaattaggcgaggatgctcatattgtctctgtcatatcttccagcaagaaggcatacgggttaactagggcagcggacaataatatccccacaaaggtttgttcgctatacccatatacaaagggtattgcgaaggaggacaaagccgcaagggccaaggcaagatcccagtttgagaacgacctcgcaaaactagtgctcgaggaaaagcctgacgttatcatctgcgcgggctggttattgatccttggatctactttcttgagccaactgcaatctgtgccgatattaaatctgcatccagcgctaccaggttgtttcgatggtaccacacacgcaattgaaatggcatggcgcaaatgtcaggacgagaacaagcctctgacggccggatgcatggtgcactatgtcatcgaggaggtcgacaagggtgagccattggtggtaaaaaagctagaaatcatacctggcgaagaaacactagagcagtacgagcaaagggtacacgatgctgagcacatcgcgattgtagaagctacatataaggttttacagcagcttcacaaataa

SEQ ID NO: 725 - DNA, 4077 bp, Saccharomyces cerevisiae
atgactgattatattttgccgggtcccaaggccttatctcagttcagagtcgataatctaattaaagatataaactcctatacaaacagtacttctgtcatcaatgaattgcgttcgtgttacattcactatgtcaacggcatcgctcaaaatttgtctgaacaggacactaaattgctagaagttttgttgacttacgattctgctttagatattgctaacgatccattagcaagacaattaaacgatgctgtcgctaataatttacccagttcagctcttggcgaagacacatatttgattagagttgttcctagatcaggcactatctctccttggtcttccaaggctactaatattgctcatgtatgcgggctacaagacaaagttcaacgtattgaaagaggtttagccttactcataaagactgttccaggtttccctcttttggaaaatctaaatgatatttcattgaagtgtgtctacgataggatgacacaacaattatatctgaccgaaccaccaaatacgatgagtattttcacacatgaagagccaaagccattagttcacgttcctttaactcctaaggacactaaacagtctccaaaggatattttatccaaagctaatacggaattgggtttagctctagatagtggagaaatggaatatttgattcatgcattcgtcgaaactatgaaaagagatcctactgatgttgagttatttatgttcgctcaagttaattctgaacattgtcgtcacaagatcttcaatgctgattggaccattgatggaataaaacaacaattcaccttgtttcaaatgattagaaatacccataaattaaacccagaatatactattagcgcctattctgataatgcagccgttttggatagtgaaaatgatgcctttttctttgcaccaaattcaactacaaaggaatggacctctacaaaggaaagaattccattacttatcaaagtcgaaactcacaaccatccaacagccgtgtctcctttcccaggtgctgctacaggttctggtggtgaaatcagagacgagggtgctacaggcagaggttccaagactaagtgtggtttgagtggattctctgtcagcgaccttttgataccaggtaatgaacaaccttgggagttgaatattggtaagccttaccatattgcatctgcattagatattatgattgaggctcctttgggttcagctgcatttaacaatgagtttggtagaccttgtataaacggttacttcagaactttaactacaaaggttttgaatcaccaagggaaggaggaaatcagagggttccacaagccaattatgattgcgggtggtttcggtactgttagacctcaatttgctttgaagaacaccccaataactccaggctcttgtttaattgtacttggtggtcaatctatgctgattggtttaggtggtggtgctgcttcttctgtagcttccggtgaaggttccgccgatttggattttgcttctgtacaaagagggaaccccgaaatggaacgtcgttgccaacaagtgattgacgcttgtgttgccttaggtaacaataatcctatccaatctattcacgatgttggtgctggtgggttatccaacgctttgccagaattggttcatgacaatgacttgggtgctaaattcgatattagaaaggtcctctccttagaacctggtatgtcaccaatggaaatttggtgtaatgaatcacaagaacgttatgttcttggtgtttctcctcaagacttatccattttcgaggaaatctgtaagagagaaagagcaccatttgctgtcgtcggtcacgcaaccgctgaacaaaaattgattgtagaagatcctcttttgaaaacaactccaattgatttagaaatgccaattttatttggtaagcctccaaagatgtcaagagaaaccataactgaagcactaaatctaccagaggcaaatttgagcgaaattccttccctacaagatgctattcaaagagttctaaacttaccatctgttggctcaaagtcatttttgattactattggtgacagatccgtcacaggtctaattgatagggatcaatttgttggtccttggcaagtacctgttgcggatgtcggtgttaccggtacctctttgggtgagacaataatttccacaggtgaagccatggctatgggtgaaaaaccagttaacgccctaatctccgcatctgcttccgctaaattatctgtggcagaatctttattgaacatattcgctgctgatgtgaaatctttaaatcatatcaagctatctgctaactggatgtctccagcctctcatcaaggtgagggttctaagttatatgaagccgttcaagcattaggtctggatttatgtcctgcattaggtgttgctatccctgttggtaaggattccatgtccatgaagatgaaatgggatgataaggaagttactgcaccattgtcattgaatatcacagcatttgcaccagttttcaacactagtaaaacgtggactccattgctaaatagaaacacagatgattctgtccttgtcttggttgatctatcagctaaacaagagactaagtcactaggtgcctctgctttgttgcaagtttacaaccaagttggtaacaagtcgcctactgtgtatgataacgccattttgaagggtttcttggaaagtttaatccaattgcatcaacaaaaggaggatatagtgcttgcctaccatgataggtctgatggtggtctactaatcactttactggaaatggcatttgcttccagatgcggcttagaaatcaacattgacggtggagacctagaaagtcaattaacaaacctattcaatgaagaattaggtgcagtattccagatttctgctaagaacttgagcaagttcgaaaaaatcttgaacgagaacggagttgctaaagaatatatttctattgttggtaagccatccttccaaagccaggaaatcaagattattaactccacaacaaatgatgtaatttacgccaattcgagatctgaattggagcaaacttggagtaagacatcttacgaaatgcagaaattgagagacaatccaaaaacagccgaagaagagtttgccagtatcacggacgatagagatcccggtttgcagtatgccctaacatacaacccagccgatgatatgaagatcggattagaattatccagtcaaaggccaaaggttgctatcttaagagagcaaggtgtgaacggtcaaatggaaatggcatggtgcttccaacaagctggattcaactcagtggatgtcactatgacagatttgctagaaggtaggttccatttggatgacttcatcggtcttgccgcatgtggtggtttctcttatggtgatgtcttaggtgcaggtgcgggttgggctaaatccgtattgtatcacgaaggtgtgcgctcgcaattttctaagttcttcaatgaaagacaagatacatttgcttttggtgcttgtaatggttgtcaattcttgagtagattaaaagatatcatacccgggtgtgaaaactggccaagtttcgaaagaaatgttagtgaacaatatgaagcccgtgtatgtatggtgcaaatatctcaagaaaaggacaattctagcgaggaatctgttttcttgaatggcatggcaggatccaaattgccaattgctgtcgcacatggtgaaggtaaagcaacattttctaaaagcgctgaacaactggaaaagttcgaaaaggatggtttatgttgtataaggtatgtggacaactacggtaacgtcaccgaaaggttccccttcaaccccaatgggtcgaccaatggtattgccggtatcaagtcaccaaatggtagagtgcttgccatgatgccacatcctgaaagagtttgcagattggaggccaattcctggtatccagagggcaaatacgaagagtggggtggatacggtccatggattagattattcagatctgccagaagatgggtcggttga

SEQ ID NO: 726 - DNA, 1716 bp, Saccharomyces cerevisiae
atggattctagaacagttggtatattaggagggggacaattgggacgtatgattgttgaggcagcaaacaggctcaacattaagacggtaatactagatgctgaaaattctcctgccaaacaaataagcaactccaatgaccacgttaatggctccttttccaatcctcttgatatcgaaaaactagctgaaaaatgtgatgtgctaacgattgagattgagcatgttgatgttcctacactaaagaatcttcaagtaaaacatcccaaattaaaaatttacccttctccagaaacaatcagattgatacaagacaaatatattcaaaaagagcatttaatcaaaaatggtatagcagttacccaaagtgttcctgtggaacaagccagtgagacgtccctattgaatgttggaagagatttgggttttccattcgtcttgaagtcgaggactttggcatacgatggaagaggtaacttcgttgtaaagaataaggaaatgattccggaagctttggaagtactgaaggatcgtcctttgtacgccgaaaaatgggcaccatttactaaagaattagcagtcatgattgtgagatctgttaacggtttagtgttttcttacccaattgtagagactatccacaaggacaatatttgtgacttatgttatgcgcctgctagagttccggactccgttcaacttaaggcgaagttgttggcagaaaatgcaatcaaatcttttcccggttgtggtatatttggtgtggaaatgttctatttagaaacaggggaattgcttattaacgaaattgccccaaggcctcacaactctggacattataccattgatgcttgcgtcacttctcaatttgaagctcatttgagatcaatattggatttgccaatgccaaagaatttcacatctttctccaccattacaacgaacgccattatgctaaatgttcttggagacaaacatacaaaagataaagagctagaaacttgcgaaagagcattggcgactccaggttcctcagtgtacttatatggaaaagagtctagacctaacagaaaagtaggtcacataaatattattgcctccagtatggcggaatgtgaacaaaggctgaactacattacaggtagaactgatattccaatcaaaatctctgtcgctcaaaagttggacttggaagcaatggtcaaaccattggttggaatcatcatgggatcagactctgacttgccggtaatgtctgccgcatgtgcggttttaaaagattttggcgttccatttgaagtgacaatagtctctgctcatagaactccacataggatgtcagcatatgctatttccgcaagcaagcgtggaattaaaacaattatcgctggagctggtggggctgctcacttgccaggtatggtggctgcaatgacaccacttcctgtcatcggtgtgcccgtaaaaggttcttgtctagatggagtagattctttacattcaattgtgcaaatgcctagaggtgttccagtagctaccgtcgctattaataatagtacgaacgctgcgctgttggctgtcagactgcttggcgcttatgattcaagttatacaacgaaaatggaacagtttttattaaagcaagaagaagaagttcttgtcaaagcacaaaagttagaaactgtcggttacgaagcttatctagaaaacaagtaa

SEQ ID NO: 727 - DNA, 921 bp, Saccharomyces cerevisiae
atgtcaattacgaagactgaactggacggtatattgccattggtggccagaggtaaagttagagacatatatgaggtagacgctggtacgttgctgtttgttgctacggatcgtatctctgcatatgacgttattatggaaaacagcattcctgaaaaggggatcctattgaccaaactgtcagagttctggttcaagttcctgtccaacgatgttcgtaatcatttggtcgacatcgccccaggtaagactattttcgattatctacctgcaaaattgagcgaaccaaagtacaaaacgcaactagaagaccgctctctattggttcacaaacataaactaattccattggaagtaattgtcagaggctacatcaccggatctgcttggaaagagtacgtaaaaacaggtactgtgcatggtttgaaacaacctcaaggacttaaagaatctcaagagttcccagaaccaatcttcaccccatcgaccaaggctgaacaaggtgaacatgacgaaaacatctctcctgcccaggccgctgagctggtgggtgaagatttgtcacgtagagtggcagaactggctgtaaaactgtactccaagtgcaaagattatgctaaggagaagggcatcatcatcgcagacactaaattcgaattcggtattgacgaaaagaccaatgaaattattctagtggacgaggtgctaacgccagactcctctagattctggaacggtgcctcttataaggtaggagaatcccaagattcttacgataagcaatttttaagagactggcttactgctaataagttgaacggtgttaacggcgtcaaaatgccccaagacattgtcgacaggacaagggccaaatatatagaggcttatgaaacattgacagggtctaaatggtctcactaa

SEQ ID NO: 728 - DNA, 1449 bp, Saccharomyces cerevisiae
atgcctgactatgacaattacactacgccattgtcttctagatatgcctccaaggaaatgtcagcaacgttttctttgagaaacagattttccacatggagaaaactatggttaaatttggctattgctgagaaggaattgggcttaactgttgttacagatgaagcaattgagcaaatgcgcaaacacgtcgaaatcactgatgatgaaatcgcaaaagcttctgctcaagaagccattgtaagacatgatgttatggcacatgttcatacatttggtgaaacttgtccggctgctgcgggtatcattcacttaggtgctacttcctgtttcgttacagacaatgctgatctaatctttattagggacgcctacgatattattattccaaaacttgttaacgtcatcaacagattggctaagtttgctatggaatacaaggatttgcctgtattgggttggactcactttcaaccagcacaattaacgaccttgggtaagagagctactttatggatacaagagctattgtgggatttgagaaactttgaaagagctagaaacgatatcggtctacgtggtgttaagggtactactggtactcaggcatcattcttggccttattccatggtaatcatgataaagttgaagcccttgacgaaagagtaactgaattattaggtttcgataaggtatatccagtcactggtcaaacctactcaagaaaaattgacattgacgtgttggctcctttgtcttcttttgctgctactgcacacaaaatggctactgacataagattattagccaacctgaaggaagttgaggaaccttttgagaaatcacaaatcggatcctctgctatggcttacaagagaaacccaatgcgttgtgagagagtgtgctccttggctagacacttaggttccttgtttagtgacgccgttcaaactgcatccgttcaatggttcgaaagaactctggatgattctgctattagaagaatttctttaccaagtgcatttttaaccgcagatattctattatctactttgttgaacatctcatccggtttagttgtgtatccaaaggttatcgaaaggagaattaagggtgaactaccttttatggctactgaaaatatcatcatggctatggtagaaaagaatgcctccagacaagaagtacatgagcgtattagagtgctctctcatcaagccgcagcagtagtcaaggaagaaggtggggaaaatgatttaattgaacgagtaaagagggatgaatttttcaagcctatctgggaagaattagattctttactggaaccatccacttttgttggtagagctccacaacaagttgagaaatttgttcaaaaagacgttaacaatgctttacaacctttccaaaagtacctaaacgatgaacaagtcaagttaaatgtttag

SEQ ID NO: 729 - DNA, 1779 bp, Saccharomyces cerevisiae
atggccaattacacaaaaaccgcaatcctatccgtctatgacaagacaggtctacttgatttagccagaggcctcatcgagaagaacgttcgtattctcgcctccggtggtactgctcgtatgattcgtgacgctggttttccaatcgaagacgtttctgctatcacacatgccccagaaatgttgggaggtagagtgaaaactttacatcctgccgttcatggtggtatccttgctagggacatcgatagcgatgagaaagacttgaaggaacagcacattgaaaaagtcgattatgtcgtttgtaacctatacccattcaaagaaactgttgctaaggtgggtgtgactattccagaagcagtagaagaaattgatattggtggtgttactctattaagagcagctgctaagaaccatgctagagtcactattttatctgatccaaaggactactccgaatttttaagtgaattatccagtaatggtgaaatctctcaagatttgagaaacagattggcattaaaggctttcgaacacactgccgattatgatgctgcaatttcagatttcttcaggaaacaatactctgaaggtcaagctcaaattactctacgttatggtgccaatccacaccaaaagccggctcaagcttacgtcagtcaacaagacagtttacctttcaaagtcctatgtggttcaccaggttacattaatttgttggatgctctaaattcctggcccctggttaaggaattatccgcctcgttgaatttaccagcagcagcatcgttcaagcatgtatcaccagctggtgccgctgtgggtatcccattgtctgatgttgaaaagcaagtttattttgttgccgacattgaaaacttatctcccctggcatgtgcctatgctagggcccgtggtgctgatagaatgtcttcctttggtgattggattgctctttccaacatagttgatgttccaacagctaagatcatatctagagaagtttctgatggtgttattgccccaggttatgagcctgaggcgttggccattctatccaagaagaagggaggtaagtactgcatattacaaattgatccaaactatgttccagaagctgtcgaaagaagacaagtatacggtgtgactttggaacaaaagagaaacgatgccataatcaatcaatcaactttcaaagaaattgtttctcaaaataaaaatctcactgaacaagccataattgatttaacggttgccaccattgctattaaatatactcaatctaattccgtatgttatgctagaaatggtatggttgtcggattgggtgcaggtcaacaatctagaatccattgtacaagattagctggtgataaggctgataattggtggttcagacaacaccctagagttttggagattaaatgggctaaaggcgtcaagagaccagaaaaatctaatgctatcgatttattcgtaaccggccaaattccaacagaagaaccagaattgtctgaataccaatcgaagttcgaggagattccaaaaccatttactccagaagaaagaaaggaatggttgagtaaattaaccaacgtttctttgtcatcggatgcatttttcccattcccagacaatgtttacagagcagttaaatccggtgtcaaatacattgccgctccatctggttctgtcatggacaaggttgtattttcagctgccgattcattcgatttggtttacgtagagaacccaatccgtttgttccaccattag

SEQ ID NO: 730 - DNA, 1776 bp, Saccharomyces cerevisiae
atgggcaaatataccaagactgcgatcttgtcagtttatgataagacaggtttattagacttagccaagggattggtagagaacaatgttcgtatcctagcatccggtggtacggccaacatggtcagagaagctggttttccggtcgacgatgtttcttcaattacgcatgcaccagaaatgctagggggtagagtcaagactcttcaccctgctgtgcatgcaggtattcttgccagaaatttagagggcgatgaaaaagatttaaaagagcagcacattgataaggtggattttgttgtatgtaatctatatccgttcaaagaaactgtggctaaaattggtgttacagttcaagaagctgtagaggagatcgacattggcggtgtgactttgttgagagcagccgcaaagaaccattccagagtgactattctttcagaccctaatgactattctatctttctgcaagacctgtctaaggacggtgaaatttctcaggatttaagaaatagatttgcacttaaggcgtttgaacatacggccgattatgatgcggccatttctgactttttcaggaaacagtactccgaagggaaagcccaattaccgctaagatatggttgtaatccccaccaaagacctgcacaagcttatatcactcagcaggaggagttgcccttcaaagtgctctgcggtacaccaggatatataaatcttttggatgccttgaactcatggcccttagtgaaagagttatctgcatcattgaacttgcctgcggcagcatcgttcaagcacgtttctccagcaggtgctgctgtgggacttccattatccgatgtggaaagacaagtttattttgtgaatgatatggaggatttatcaccattggcatgcgcatacgctagggcccgtggtgcagataggatgtcatcctttggtgatttcattgcattgtccaatattgtagatgtcgccactgcaaaaatcatctctaaagaagtttccgatggtgttattgctccagggtatgaaccagaggcattgaatatactatctaagaagaaaaacggaaaatactgtattttacaaatcgatccaaactatgttcctggccaaatggaatcccgagaggtttttggcgtaacgttacaacaaaagagaaacgatgcgatcataaaccaatccactttcaaagaaattgtctccaaaaacaaagcacttaccgagcaagccgttatcgatctaactgttgctacgctggttttaaaatacacacaatcaaattctgtttgctacgcaaagaatggtatggttgtggggcttggggccggccaacaatcgcgtatacactgtaccagattagctggtgacaagacggacaactggtggttgagacaacatccaaaggttttgaacatgaagtgggccaagggaattaagagagcggacaagtcgaatgcgattgatctttttgttacagggcaaagaatagaaggcccggaaaaggtggattacgaaagcaaatttgaagaagtccctgaacctttcaccaaagaagaaagactagaatggttaagcaaattaaacaatgtatcgttatcatccgatgcgttctttcccttcccagacaacgtttatagagctgtgcagtctggtgtaaagttcatcacggctccttcggggtctgtcatggacaaagttgtcttccaagcggcggattcatttgatatcgtctacgtggagaacccaattcgtttattccaccactaa

SEQ ID NO: 731 - DNA, 1578 bp, Saccharomyces cerevisiae
atggctgccggtgaacaagtttctaacatgtttgacactatcttagtgttagactttggttctcaatactctcatttgattaccagaagattaagagagtttaacatctatgctgagatgttgccatgcactcagaagatctctgagttgggctggactccaaagggtgtcattctttctggtggtccatattccgtatacgctgaagacgctccacacgtagaccatgctatctttgatttgaacgttccaatcctgggtatctgttacggtatgcaagaattggcttggattaatggtaaacaagttggtcgtggtgacaagagagagtacggtcctgccactttgaaggtgattgacgattccaactctctattcaaaggtatgaacgactctactgtctggatgtctcacggtgataaattgcacggcttgccaactggttacaagaccattgccacctccgataactccccatactgtggtattgtccacgaaactaagccaatctatggtattcaattccacccagaagttacacattctacccaaggtaagactcttttgaaaaacttcgccgttgatttgtgtcacgctaagcaaaactggactatggaaaactttatcgacactgaaataaacagaatcagaaaactggtcggtccaactgctgaagtcattggtgctgtttccggtggtgttgattctactgttgcatccaaattgatgacagaagccatcggtgatagattccatgccatcttggtcgataacggtgttttgagattaaatgaagctgctaacgttaaaaagacccttgtcgaaggtttaggtatcaacttgatggttgtcgatgcttccgaagaatttttaagtaaattgaagggtgtcactgacccagaaaagaagagaaagattattggtaacacatttatccacgtctttgaaagagaagctgaaaaaattaagccaaaagatggtaaggagattcaattcctgttacaaggtactctttatccagatgtcatcgaatccatttctttcaaaggtccttctcaaaccattaaaactcatcacaacgtcggtggtttactagagaacatgaaattaaagctaattgaaccattgagagaactgttcaaagacgaagtcaggcatctaggtgaattattaggaatccctcatgatctagtctggagacaccctttccctggtccaggtattgctattcgtgttctaggtgaagttactaaggaacaagtcgaaatagcaagaaaagctgacaacatttacattgaagaaatcaagaaggccggcttatacaaccaaatttcccaagcctttgcctgtttgttgcccgttaaatccgttggtgttatgggtgaccaaagaacctatgatcaagttattgctttgagggccattgaaactactgatttcatgactgctgactggttcccattcgaacacagtttcttgaagaaagtcgcctcaagaattgtcaatgaagtcgatggggttgctagggtcacttacgatataacttccaaacctcctgcaactgttgaatgggaatga

SEQ ID NO: 732 - DNA, 564 bp, Saccharomyces cerevisiae
atgtcccgtcctatcgtaatttctggcccaagtggtacaggtaaatctacactgttgaagaaattgttcgctgaatacccagattctttcgggtttagtgtttcatccactactagaaccccaagagctggcgaagtaaacggtaaggactataactttgtctccgtagatgaattcaaatctatgattaagaacaatgaattcattgaatgggcgcaattctccggtaactactatggtagtactgtcgcttccgtcaaacaagtcagtaaatctggtaagacttgtattttagatattgatatgcagggtgtcaaatctgtcaaggctatcccagagttaaatgccaggtttttgtttattgctccaccatcggtcgaggatttgaaaaaaagattagaaggtagaggtacggagaccgaagaatccatcaacaagaggttaagcgccgctcaagctgaattggcatatgctgagacaggtgcccatgacaaagttattgtcaatgatgatttggacaaggcctacaaggaattgaaggattttatctttgcagaaaaatga

SEQ ID NO: 733 - DNA, 732 bp, Saccharomyces cerevisiae
atgcataacatccaattagtgcaagagatagaaagacatgaaaccccgttaaacattagacctacctctccatacactttaaaccctcctgtcgagagagatgggttttcttggccaagtgtgggtacaagacaacgtgcagaggaaactgaagaggaggaaaaggaacgaattcaacgcatttcaggcgctatcaagacaattttgaccgaactgggtgaagatgtcaacagagaaggtctactagatactccacaaagatacgctaaagccatgctttatttcactaaaggttaccaaacgaacattatggacgatgtcattaagaatgctgtctttgaagaagatcatgatgaaatggttattgttcgtgatattgaaatttactcgttatgtgaacatcatttggtgccatttttcggcaaggttcatatcgggtatataccaaataaaaaagtcatcgggttaagtaagttggccagattggcagaaatgtatgcgagaaggctccaagttcaagaaagacttacaaagcaaattgcaatggccctaagtgatattctaaaaccattaggtgtagccgttgttatggaagcttctcatatgtgcatggtttcaagaggcattcaaaaaacgggatcttctacggtaacttcttgtatgcttggagggtttagggctcataaaacaagagaagagtttttaactcttttaggaagaagaagtatttga

SEQ ID NO: 734 - DNA, 2667 bp, Saccharomyces cerevisiae
atgtacgtttataaaagagacggtcgtaaagaacctgtccaattcgataagattaccgctcgtatatcacgcttatgctatggtttagatccaaaacatatcgacgccgttaaggtcacccaacgtatcatttctggtgtctatgaaggtgtcacaacaatcgaactagacaacttagccgctgaaacatgcgcttatatgactactgttcatccagattacgccaccctagcggccagaattgccatttctaatttacataaacaaaccacaaaacaattttctaaggttgtcgaagatctttatagatacgtcaatgctgctactggtaagcccgctcccatgatctctgatgatgtctacaatattgtcatggaaaacaaggataaattgaactccgcaattgtctatgacagagattttcagtacagttattttggttttaaaactttggaacgttcttatttactaagaatcaacggtcaagtggccgaacgtccacaacatttaattatgagagtcgcactaggcatccacggtagagatatcgaggctgctttagaaacgtataacttgatgtctctaaaatattttactcacgcctctccaacgttgttcaatgccggtactccaaaacctcaaatgtcctcttgtttcttggttgccatgaaggaggactctatcgaggggatttacgacaccttgaaggaatgtgctttgatttccaaaactgctggtggtattggtctacatatccataacattcgttcaactggttcttacattgctggtacaaacggtacttctaacggtttaattcctatgattcgtgttttcaataacactgcccgttatgttgaccagggtggtaataaaagacctggtgcgtttgccctttacctggaaccatggcatgctgatatatttgattttattgatattaggaagaaccacggtaaagaggaaattcgtgcaagagatttgttccctgctctatggattcctgatcttttcatgaagcgtgtcgaagaaaatgggacctggacattattctctccaacatcagctcctggtttaagcgattgttacggtgacgagtttgaggctctatatacccgctacgagaaagaaggtcgtggtaagactatcaaagcccaaaaattatggtattccattttggaagctcaaactgaaactggtacacctttcgttgtttacaaggatgcttgtaacagaaaatctaatcaaaaaaacttaggtgtcatcaagtcatcaaacttatgctgtgaaattgttgaatactcagctccagatgaaactgctgtttgtaacttggcttccgttgccttaccagcattcattgaaacttctgaggatggtaagacttccacatacaacttcaaaaaattacatgaaattgctaaagttgttactcgtaatttaaacagagtcattgatcgtaattactaccctgttgaagaagcgagaaaatccaatatgagacatagaccaattgctttgggtgttcaaggtctcgctgacactttcatgctgttacgtttgccatttgattctgaggaagcccgtttgctaaatatccaaatctttgaaactatttatcatgcctccatggaagcttcttgtgaactagctcagaaggacggtccatacgaaactttccaaggatctcctgcttctcaaggtatactacagtttgatatgtgggaccaaaaaccctacggcatgtgggattgggacaccttaagaaaagatatcatgaagcatggtgttagaaattccttgaccatggcaccaatgcctactgcatccacatcccaaatattgggttataatgaatgtttcgaaccagtcacttccaatatgtactcccgtcgtgtcttatccggtgaattccaggttgtgaacccttacttactgcgtgacttggttgatttaggtatttgggatgagggtatgaaacagtatctgattacacaaaatggctccattcaaggcttaccaaacgttccacaagaattgaaggacttatacaagactgtttgggaaatttcacaaaagactatcattaacatggcagccgatcgttctgtctatattgatcaatctcattctttgaatttgttcttacgtgccccaactatgggtaaactaacaagtatgcatttttacggatggaagaagggattgaagaccggtatgtactatttgagaacccaagctgcatctgctgcaattcaatttactattgatcagaagattgcggatcaagctacagaaaacgttgctgatatttccaacttgaagcgtccatcatatatgccttccagtgcaagctacgctgccagcgatttcgtgcccgcagctgtgactgcaaacgcaactattccatctctagatagctcctcggaagcttcaagagaggcatctccagctccaacaggtagccactcattaactaaaggaatggcagaattaaacgttcaagagtctaaggtagaagttcctgaagtacctgccccaactaagaatgaagaaaaagctgcccccatcgttgatgatgaggaaaccgagttcgacatttacaactctaaggttatagcatgtgctattgataacccagaagcttgtgaaatgtgttcgggttaa

SEQ ID NO: 735 - DNA, 1200 bp, Saccharomyces cerevisiae
atgcctaaagagaccccttccaaagctgctgccgatgcattgtccgacttggaaatcaaagattccaagtccaaccttaacaaggaattggagacattgagagaggaaaacagagtaaagtcagacatgcttaaggagaaattgagcaaggacgctgaaaatcacaaggcttacttgaaatctcatcaagttcaccgtcacaaacttaaggaaatggaaaaggaggaacctttgttgaatgaagacaaggagagaactgttcttttccctatcaagtaccatgaaatctggcaagcctacaagcgtgccgaagcttctttctggaccgctgaagaaattgatttgtctaaggatatccatgactggaacaacagaatgaacgaaaacgagagatttttcatttccagagttcttgcctttttcgccgcttctgacggtattgttaatgaaaacttggttgaaaacttctccaccgaagtccaaattccagaggcaaagagtttctacggtttccaaatcatgattgaaaatattcactctgaaacttactccttgttgatcgatacttacatcaaggaccctaaagaaagtgaattcttgttcaatgccattcacaccatcccagaaatcggtgagaaggccgaatgggctttaagatggattcaagacgctgacgccttgtttggtgaaagactagttgcctttgcctccattgaaggtgtctttttctccggttcctttgcctccattttctggttgaaaaagagaggtatgatgcccggtttaaccttttccaacgaattgatctgtagagacgaaggtttgcacaccgactttgcatgcttgttgttcgcccatttgaagaacaaaccagacccagccattgttgaaaaaattgtcaccgaggctgtggaaattgaacaaagatacttcttggacgccttaccagttgctttgctaggtatgaacgctgacttaatgaaccaatacgttgagttcgtcgccgacagactgttggttgctttcggtaacaagaaatactacaaggtcgaaaaccccttcgatttcatggaaaacatctccttggccggtaagaccaacttcttcgaaaagagagtttctgactaccaaaaggctggtgttatgtccaagtcgactaagcaagaagccggtgctttcaccttcaacgaagacttttaa

SEQ ID NO: 736 - DNA, 2610 bp, Saccharomyces cerevisiae
atgtacgttattaaaagagacggccgcaaagagcccgttcaattcgataaaattacctcccgtatcacccgtttgtcatacggtttagacccaaaccgtattgatgctgttaaggtaacccaacgtattatttctggtgtgtactccggtgttactaccgttgagctggacaatcttgcagctgaaacatgtgcatacatgaccactgtgcaccctgattatgccactctagccgctagaatcgccatctctaacttacataagcaaaccacaaagcaattctccaaagttattgaggatttacacgactggattaacccagctactggaaagcatgctcctatgatttcggacgaaatttacaacattgtcatggaaaacaaagatactttgaactcggccatcgtgtacgatagggatttccagtatacgtatttcggattcaagacactggagcgttcgtacttgctaagactgaacggtgaagtggcagaacgtcctcagcatttggtaatgcgtgtggcgctaggtatccatggtagcgatatcgaatctgtgctgaagacttataatttgatgtcgttaagatacttcactcacgcttccccaactttattcaacgctggtacgccacatcctcaaatgtcttcatgtttcttaattgccatgaaggatgactctatcgaaggtatttatgatactttgaaagaatgtgctatgatttccaaaactgcaggtggtgttggtcttcatatcaacaacatccgttccacaggttcttatatcgctggtaccaacggtacttcaaacgggttgattcctatgattcgtgttttcaataatactgcccgttatgtggaccagggtggtaacaagagacctggtgctttcgcccttttcttggagccatggcatgcagatatcttcgactttgtcgatatcagaaaaacacatggtaaggaagaaattcgtgcaagagatttgttccctgctctatggatccctgatcttttcatgaaacgtgttcaagaggatgggccttggactttgttttcgcccagtgctgccccaggtttagatgatgtgtggggtgatgaatttgaagaactatatactcgttacgaaagagaaggtcgtggtaaaacaattaaagcccaaaagttgtggtatgccattttgcaagcacagacagaaacaggtacacctttcatggtttataaggacgcatgtaacaggaagacaaaccaacagaacttaggtactatcaaatcatctaatttatgttgtgaaatcgtcgaatattcctccccggatgaaactgcagtttgtaatttagcttctattgccctaccagcattcgttgaggtttcagaagatggtaaaactgcaagctataatttcgagagattacacgagattgctaaagtcattactcacaacttgaacagagttatcgaccgtaattactatccagttcccgaggctagaaattcaaatatgaagcatagacctattgctcttggtgtccagggtttggccgatacttatatgatgttgcgtctaccctttgaatcggaagaagctcaaactctaaacaaacaaatcttcgaaactatttaccatgctactcttgaagcctcctgtgaattggcccaaaaagaaggtaaatattctacttttgaaggttctccagcttctaagggtattttacaattcgatatgtggaacgctaaaccatttggcatgtgggattgggaaaccttaagaaaggacattgttaaacatgggttaagaaactctttgactatggcaccaatgccaaccgcctcaacttcccaaattcttggttataatgaatgcttcgaaccagtgacctcaaacatgtactctcgtcgtgtcctgtctggtgaattccaagttgttaatccatatttactacgtgatttagtcgacctgggtatttgggatgatagtatgaaacaatatctaattacacaaaatggttctattcaaggcttaccaaatgtgccacaagaattgaaggaattatacaaaaccgtctgggaaatctctcaaaagaccattatcaatatggctgctgatcgtgccatctacatcgatcagtctcattccttgaatcttttcttgcaagcaccatcaatgggtaagattactagtatgcatttctacggttggaagaagggtttaaaaactggtatgtactacttaagaacgcaagccgcctccgctgctattcaatttaccattgatcaagaggttgccgatcaagccgctacacatattgcttccgtctcagaattggatcgtccagtttatgttccaaagggtacaaaattctctgaacaaaaggcggcatctgcgcttaccgaaagctcagataatgagaaggatgcatctccagttccatccgaacaatcatcggtgtcgagtgccatgtcaaatgtgaaattggaagatagtgttgccccagcagttccaacggaaacaataaaagaagattccgacgagaagaaatgtgacatttacaatgaaaaggtgattgcttgtactgctcctactccagaagcttgtgagtcatgttccggttga

SEQ ID NO: 737 - DNA, 1038 bp, Saccharomyces cerevisiae
atggaagcacataaccaatttttgaagactttccaaaaagaacgtcatgatatgaaagaagctgaaaaggatgaaatccttttgatggaaaacagccgtagattcgtgatgttccctatcaaataccacgaaatctgggctgcttacaagaaggttgaagcctctttctggactgcggaagaaatcgaattggctaaggacactgaagatttccaaaaattgactgatgaccagaagacctacatcggtaacttgttagccttgtccatttcttctgacaaccttgtcaacaagtacttgatcgaaaacttttctgcccaattgcaaaaccctgaaggtaagagtttctacgggttccagattatgatggaaaacatctactctgaagtttactccatgatggttgatgccttcttcaaggaccctaagaacatccctctattcaaggaaattgccaatttgcctgaagtcaagcataaggctgctttcatcgagagatggatttccaacgatgacagcttgtatgctgaaagactagtagcatttgctgcaaaggaaggtattttccaagctggtaactatgcttctatgttctggttgactgacaaaaagattatgccaggtttagcaatggccaacagaaacatctgtagagacagaggtgcctacactgacttttcatgcttgctatttgcccatttgagaaccaagccaaaccccaagatcattgaaaaaatcattaccgaagccgtggaaattgaaaaggaatactactcaaactctttgccagtagaaaaatttggtatggatttgaagagcattcacacctacatagaatttgtcgctgacggtctattacaaggtttcggtaacgaaaaatactacaacgccgtcaacccattcgaattcatggaggatgtcgctaccgctggtaagaccaccttctttgaaaagaaggtttccgactaccaaaaggccagtgacatgtctaagtccgctaccccatccaaggaaattaactttgatgatgacttctaa

SEQ ID NO: 738 - DNA, 462 bp, Saccharomyces cerevisiae
atgtctagtcaaacagaaagaacttttattgcggtaaaaccagatggtgtccagaggggcttagtatctcaaattctatctcgttttgaaaaaaaaggttacaaactagttgctattaaattagttaaagcggatgataaattactagagcaacattacgcagagcatgttggtaaaccatttttcccaaagatggtatcctttatgaagtctggtcccattttggccacggtctgggagggaaaagatgtggttagacaaggaagaactattcttggtgctactaatcctttgggcagtgcaccaggtaccattagaggtgatttcggtattgacctaggcagaaacgtctgtcacggcagtgattctgttgatagcgctgaacgtgaaatcaatttgtggtttaagaaggaagagttagttgattgggaatctaatcaagctaagtggatttatgaatga

SEQ ID NO: 739 - DNA, 1302 bp, Saccharomyces cerevisiae
atggttaacgttgtattgggctcccaatggggtgatgagggtaaaggtaaactagttgatttactggttggtaaatatgatattgtagcccgttgcgccggtggtaacaatgccgggcataccattgttgtagacggtgttaagtatgatttccatatgttaccatctggtttagtcaacccaaactgccaaaaccttttgggtaatggtgttgttattcatgttccatcttttttcaaagagttggaaaccttggaagctaaaggtttgaagaacgcaaggagtagattatttgtttcttccagagcacatttagtctttgactttcatcaggtgactgacaagctaagagaattggagttatcaggtcgttctaaagatggtaaaaatatcggtactaccggtaaaggtattggtccaacttattccacaaaggcttctagatctggtttgagagttcatcatttggtgaatgatcaacccggtgcctgggaggaatttgttgctagatataagagattattggaaacgagaagacaaagatacggtgatttcgaatacgactttgaagccaagcttgctgaatacaagaagttaagagagcaactaaagccattcgtcgtcgattctgtcgttttcatgcacaatgctattgaagcaaagaaaaagatattggttgagggtgctaatgctttgatgttggatattgattttggtacttatccatatgtgacttcttccaatactggtattggtggtgtcctcaccggtttaggtattcctccacgtactattgatgaaatttatggtgttgttaaagcctacacaactagagttggtgaaggtcctttcccaacggaacaattgaacgaaaatggagaaaaactgcagaccattggtgctgaatttggtgtcactactggtcgtaagcgtcgttgcggttggttagacttggtagtcttgaaatactcaactttgatcaatggatacacgagtttgaacattaccaagttagacgtcctcgatactttcaaagaaatcccagtgggtatttcatattctattcaaggtaagaagctagatttgttccctgaagacttgaatattcttggtaaagttgaagttgaatacaaagttttgccaggttgggatcaagatattaccaaaattacaaagtatgaagatttgccggaaaacgcaaagaagtacttaaaatatattgaagattttgttggcgttcctgttgaatgggttggtaccggccccgcaagagaaagcatgttgcataaagaaattaaatag

SEQ ID NO: 740 - DNA, 669 bp, Saccharomyces cerevisiae
atgtctagctcagaatccattagaatggtcctaattggcccacctggtgccggtaaaggtactcaagctccaaatttgcaagagcgtttccatgccgctcacttggccactggtgacatgttgagatctcaaatcgcaaagggcactcaattaggtttggaagcaaagaaaattatggaccaaggtggtttagtctctgatgacattatggttaacatgatcaaggatgaattgaccaacaatccagcttgtaagaatgggttcatcttggacggtttcccaagaaccattcctcaggctgaaaaattggaccaaatgttgaaagaacaaggaactcctttggaaaaagccatcgaattgaaggttgatgatgaattgttggttgccagaattaccggtagattaattcacccagcctctggcagatcctaccacaagatctttaacccaccaaaggaagacatgaaggatgacgtcaccggtgaagctttagttcaaagatctgatgacaatgcagacgccttgaagaagagattagctgcttaccatgctcaaaccgaaccaattgttgacttttacaaaaagaccggtatctgggctggtgttgatgcttcccaacctcctgctactgtttgggctgacatcttgaacaagctaggtaaggattaa

SEQ ID NO: 741 - DNA, 678 bp, Saccharomyces cerevisiae
atgaaagcagacgcgaaacaaataacacatctactcaaacctcttcgacttttattattgggggctccagggtcaggtaaagggacacagacttcgagattactaaagcaaattccacaattatcttcaatttcgtcaggcgacattttacgtcaggaaataaaatctgaatctaccctaggccgagaggctactacctacattgctcaaggcaagttattaccggatgatctcataacgcgtctgataacttttcgtctttcggcattgggttggttaaaaccatctgccatgtggttgctcgatggatttcctcgaactactgcgcaagcttctgccttagacgagctgctgaaacagcatgacgccagcttgaatctagtggtagagctagatgtacccgaatccaccatattagaaaggatcgagaacagatatgttcacgttcctagtgggagagtgtataacttacaatataatcctcccaaagtgccaggattagacgatatcaccggagaaccattgaccaagaggcttgatgacacagcggaagtgtttaaaaaaaggctagaagagtacaagaaaacaaatgagcctttaaaagattattacaaaaaaagtgggatttttggtaccgtctctggggaaacatcagatattatcttccgaaattattga

SEQ ID NO: 742 - DNA, 6645 bp, Saccharomyces cerevisiae; identical to SEQ ID NO: 675

SEQ ID NO: 743 - DNA, 1095 bp, Saccharomyces cerevisiae
atggtacaagaaatcgatttaggtttgacatgtgatatgcatgttcatgtaagagagggtgcgatgtgtgaactagtcacccccaagattagagatggtggggtttcaattgcttacatcatgccaaatttacaacctccaattaccacactagatagagtgattgaatacaaaaagacactgcagaaactagctcctaaaactaccttcttaatgagtttttatctttcaaaagacttaactccagatttaattcatgaagctgcccaacaacatgccattcgtggagtaaagtgttatccagcgggagtaacaacaaattcggctgctggggtggatccaaatgacttcagcgcattttacccaattttcaaggctatgcaagaagagaacctggtattaaatttgcatggggaaaaaccttctgtccatgatggagacaaagaacctattcatgtattgaatgcagaggaagcctttttgccagccttgaaaaaattgcataatgatttcccaaacctgaaaataattctggaacactgcactagcgagtcggcaataaagacaatcgaggatataaataagaacgtgaagaaagccactgacgtaaaggttgctgccacattaacggctcatcacttatttttaacaattgatgattgggccggaaatccggtaaatttttgcaaacctgttgcgaaacttccaaatgacaaaaaggctctagtcaaagctgctgtatcagggaaaccatattttttctttggatctgattcagcacctcatcctgtacaaaataaggccaattacgagggtgtttgcgcaggagtttactcacaatcttttgcgatcccttatatcgcccaagtttttgaagagcaaaatgccttggagaacttaaagggctttgtttccgacttcggaatttccttttatgaggttaaagatagcgaagtggcttcttcagataaggcaatattattcaaaaaagaacaagttatccctcaggttatcagcgatggcaaagacataagcatcatcccatttaaagcaggtgataaactaagttggtcggtgagatgggaacctcgttaa

SEQ ID NO: 744 - DNA, 945 bp, Saccharomyces cerevisiae
atgacagccagtttaactaccaagttcttgaacaatacctatgaaaacccatttatgaatgcatccggtgttcattgcatgactacacaagaattagatgaattagcaaactctaaagctggcgcattcattacaaagagtgctacaaccttagaaagagaaggtaaccctgaaccacgttacatttctgtccctctaggcagtatcaactccatgggtttaccaaacgaaggtatcgactactatttgtcctatgtattaaaccgtcaaaagaattatcctgatgcacctgctattttcttctcagttgctggtatgagcattgatgaaaatttaaatttgttgaggaaaatccaagatagcgaattcaacggtattaccgagttaaacttgtcttgtcctaatgtgcctgggaaaccacaagttgcttatgactttgacttgacaaaggaaaccttggaaaaggtttttgcctttttcaaaaaacctcttggtgtcaagttgcctccttattttgattttgcccattttgatatcatggcaaaaatattgaacgagttcccattagcttatgtcaactctatcaatagtataggaaatggtcttttcattgatgtggagaaggagagtgtagtagtgaagccaaagaatggtttcgggggtattggaggtgaatatgttaagccaaccgcgctcgccaatgttcgtgcattttacactcgtttgagacctgaaatcaaagttatcggtacaggtggaattaagtccggtaaggatgcatttgaacatcttctatgtggtgcctctatgctacagattggtacagaattacaaaaagagggcgtcaagatttttgaacgtatcgaaaaagaattaaaagacataatggaagctaagggttatacatccatagatcagttccgtgggaagttgaacagcatttaa

SEQ ID NO: 745 - DNA, 681 bp, Saccharomyces cerevisiae
atgcctattatgttggaagactaccaaaagaactttctagagttggccatcgaatgccaggctctaagatttggttcattcaagttgaaatcaggtagagaatcgccatatttctttaatttgggattgttcaatactggtaaattgctttccaatttggctactgcgtatgcaattgccatcatacaatctgatttgaaatttgatgtgattttcggtcctgcctacaaaggtatcccacttgctgctattgtttgtgtgaaattggcggagattggtggctctaaatttcaaaacattcagtacgcttttaacagaaaggaagccaaagatcatggtgaaggtggtatcattgtcggctctgccctagagaacaagagaatattaatcatcgacgacgtcatgactgctggtactgccattaacgaggcctttgagatcatcagtaacgccaagggtcaggtagttggctccataattgctcttgatagacaggaagttgtgagtactgacgataaagaaggactcagcgccactcaaactgttagcaaaaaatacggtatcccagtcttgagcattgtctccttaattcacataattacctatttggaaggcagaataacagcagaagagaaaagcaagatcgaacaataccttcaaacctacggtgcctccgcttaa

SEQ ID NO: 746 - DNA, 684 bp, Saccharomyces cerevisiae
atgtctgcatctactacaagtttagaggaatatcaaaaaactttccttgaactgggattagaatgcaaagcactaagatttgggtcattcaagctgaattcaggcaggcagtcgccatattttttcaatcttagtttgttcaattctggaaagctgttggcaaaccttgccaccgcgtatgcaactgctatcattcaatcggagcttaaattcgatgttattttcggacctgcttacaaagggatccctttggctgctattgtatgcgttaaactagcagaaatcgggggcactaaatttcaaggtattcaatatgcttttaatagaaagaaagttaaagaccacggcgaaggtggtattattgttggagcatcgcttgaagacaagagggtgttgattatcgacgatgtcatgactgcaggaactgcaatcaatgaagcatttgagataatcagtattgctcaaggtagggtagtgggttgtattgttgctttagataggcaagaagtgattcatgaatctgatccggaaagaacaagtgctacccaatctgtttcaaagagatacaacgttcctgtgctaagtattgtatcactgactcaagtggtacaatttatgggaaatagactatcaccagagcaaaaatcagcgattgaaaactaccgtaaggcctatggtatatga

SEQ ID NO: 747 - DNA, 804 bp, Saccharomyces cerevisiae
atgtcgaaagctacatataaggaacgtgctgctactcatcctagtcctgttgctgccaagctatttaatatcatgcacgaaaagcaaacaaacttgtgtgcttcattggatgttcgtaccaccaaggaattactggagttagttgaagcattaggtcccaaaatttgtttactaaaaacacatgtggatatcttgactgatttttccatggagggcacagttaagccgctaaaggcattatccgccaagtacaattttttactcttcgaagacagaaaatttgctgacattggtaatacagtcaaattgcagtactctgcgggtgtatacagaatagcagaatgggcagacattacgaatgcacacggtgtggtgggcccaggtattgttagcggtttgaagcaggcggcggaagaagtaacaaaggaacctagaggccttttgatgttagcagaattgtcatgcaagggctccctagctactggagaatatactaagggtactgttgacattgcgaagagcgacaaagattttgttatcggctttattgctcaaagagacatgggtggaagagatgaaggttacgattggttgattatgacacccggtgtgggtttagatgacaagggagacgcattgggtcaacagtatagaaccgtggatgatgtggtctctacaggatctgacattattattgttggaagaggactatttgcaaagggaagggatgctaaggtagagggtgaacgttacagaaaagcaggctgggaagcatatttgagaagatgcggccagcaaaactaa

SEQ ID NO: 748 - DNA, 615 bp, Saccharomyces cerevisiae
atgacagctgccactacatcacagccagctttctcgcctgaccaagtttccgtgatcttcgttctaggaggacccggtgcaggcaagggtactcagtgtgaaaaactagttaaggactattcatttgtccatttgtcagccggagaccttctacgtgctgagcagggcagagcaggttcccaatatggggaattgatcaagaactgcatcaaagagggccagattgtccctcaagagattactttggcgcttttacgcaacgctatttccgataacgtcaaggcgaacaagcataagttcttaattgacggatttcctaggaagatggatcaagccatttcctttgaaagagacatcgttgaaagcaaattcatcctgttctttgactgccctgaagatatcatgttagagagactattggagcgtggcaagaccagtggtagaagcgatgacaacattgagtccattaagaagagatttaacactttcaaggagactagtatgcccgtcatcgagtactttgaaaccaaatcgaaagtcgtccgtgttcgttgcgacagatccgtcgaagatgtgtacaaagacgtccaagacgctatccgtgatagcttatag

SEQ ID NO: 749 - DNA, 1740 bp, Saccharomyces cerevisiae
atgaagtacgttgttgtttcaggtggtgtcatttcgggtatcggtaaaggtgttcttgcatcttcaactggtatgctaatgaaaaccctcggtttaaaggttacgtcaattaaaattgacccttatatgaacattgatgcaggtactatgtctcctttggaacatggtgaatgtttcgtgcttgacgacggtggtgaaacagatttggacttgggtaactacgagagataccttggagttactttgactaaagatcataacattactactggtaaaatatactcgcacgttattgctaaggaaagaaaaggtgactatttaggcaaaaccgtgcaaattgtccctcatttgaccaacgctatccaagattggattgagcgcgtggccaaaattcctgtagatgacaccggtatggaaccagatgtttgtatcattgaattgggtgggacagttggtgacattgaaagtgctccttttgtggaggcactaagacaattccaatttaaagttggaaaggaaaattttgccttgatacacgtttctctagttcctgtcatccacggtgaacaaaaaactaagccaactcaagctgccatcaaaggtttgaggtctcttggtttagttccagatatgatcgcctgtagatgtagtgaaactttggataaaccaacaatcgataagattgccatgttttgtcatgtggggcctgaacaggtggttaacgttcacgatgttaattctacttatcacgtcccattgttgctactggaacaaaagatgattgattacttacacgccagattaaagttagatgaaatatcacttacagaagaagaaaaacaaagaggcctggaattattgtctaaatggaaggccacaacaggtaacttcgatgaatccatggaaacagtgaagattgctttggttgggaaatacaccaacttgaaagattcttatctatcagtgataaaagcattggaacattcatccatgaagtgtcgtcgtaagttagacattaaatgggtggaagctactgatttggaacctgaagcacaagaaagcaacaaaactaaatttcatgaagcatggaacatggtcagtaccgcagacggtatcttaatccccggtggttttggtgttagaggtactgaaggtatggttttggctgctagatgggctcgtgaaaatcacattccattcttaggggtttgcctgggtttacaaattgccaccattgaatttacacgtagtgtgttgggaagaaaagacagtcattcggcagaattttatccagacattgatgaaaaaaatcacgttgtcgttttcatgcctgaaattgacaaggaaaccatggggggctcaatgagattaggtttgagaccaacatttttccaaaatgaaactgaatggagtcaaatcaagaagttatacggtgacgtctccgaagtccatgaaagacaccgtcaccgttacgaaatcaatccaaagatggttgatgaattggaaaacaacgggttgatctttgtaggtaaggacgacactggaaagcgttgtgagattttggaattaaagaatcacccatactatattgctactcaatatcacccagaatacacatcaaaggtcttagatccatccaaaccatttttgggtttagttgctgcttccgctggtatccttcaagatgtcattgaaggtaagtacgatcttgaggccggcgaaaacaaattcaacttttaa

SEQ ID NO: 750 - DNA, 1086 bp, Saccharomyces cerevisiae
atgatttctgctaattcattacttatttccactttgtgcgcttttgcgatcgcaacacctttgtcaaaaagagattcctgtaccctaacaggatcttctttgtcttcactctcaaccgtgaaaaaatgtagcagcatcgttattaaagacttaactgtcccagctggacagactttagatttaactgggttaagcagtggtactactgttacgtttgaaggcacaaccacatttcagtacaaggaatggagcggccctttaatttcaatctcagggtctaaaatcagcgttgttggtgcttcgggacataccattgatggtcaaggagcaaaatggtgggatggcttaggtgatagcggtaaagtcaaaccgaagtttgtaaagttggcgttgacgggaacatctaaggtcaccggattgaatattaaaaatgctccacaccaagtcttcagcatcaataaatgttcagatttaaccatcagcgacataacaattgatatcagagacggtgattcggctggtggtcataatacggatgggtttgatgttggtagttctagtaacgtcttaattcaaggatgtactgtttataatcaggatgactgtattgctgtgaattccggttcaactattaaatttatgaacaactactgctacaatggccatggtatttctgtaggttctgttggtggccgttctgataatacagtcaatggtttctgggctgaaaataaccatgttatcaactctgacaacgggttgagaataaaaaccgtagaaggtgcgacaggcacagtcactaatgtcaactttatcagtaataaaattagcggcataaaaagttatggtattgttatcgaaggcgattatttgaatagtaagactactggaactgctacaggtggcgttcccatttcgaatttagtaatgaaggatatcaccgggagcgtgaactccacagcgaagagggttaaaattttggtgaaaaacgctactaactggcaatggtctggggtgtcaattaccggtggttcttcctattctggatgttctggaatcccatctggatctggtgcaagctgttaa

SEQ ID NO: 751 - DNA, 747 bp, Saccharomyces cerevisiae
atggctagaactttctttgtcggtggtaactttaaattaaacggttccaaacaatccattaaggaaattgttgaaagattgaacactgcttctatcccagaaaatgtcgaagttgttatctgtcctccagctacctacttagactactctgtctctttggttaagaagccacaagtcactgtcggtgctcaaaacgcctacttgaaggcttctggtgctttcaccggtgaaaactccgttgaccaaatcaaggatgttggtgctaagtgggttattttgggtcactccgaaagaagatcttacttccacgaagatgacaagttcattgctgacaagaccaagttcgctttaggtcaaggtgtcggtgtcatcttgtgtatcggtgaaactttggaagaaaagaaggccggtaagactttggatgttgttgaaagacaattgaacgctgtcttggaagaagttaaggactggactaacgtcgttgtcgcttacgaaccagtctgggccattggtaccggtttggctgctactccagaagatgctcaagatattcacgcttccatcagaaagttcttggcttccaagttgggtgacaaggctgccagcgaattgagaatcttatacggtggttccgctaacggtagcaacgccgttaccttcaaggacaaggctgatgtcgatggtttcttggtcggtggtgcttctttgaagccagaatttgttgatatcatcaactctagaaactaa

SEQ ID NO: 752 - DNA, 2043 bp, Saccharomyces cerevisiae
atgactcaattcactgacattgataagctagccgtctccaccataagaattttggctgtggacaccgtatccaaggccaactcaggtcacccaggtgctccattgggtatggcaccagctgcacacgttctatggagtcaaatgcgcatgaacccaaccaacccagactggatcaacagagatagatttgtcttgtctaacggtcacgcggtcgctttgttgtattctatgctacatttgactggttacgatctgtctattgaagacttgaaacagttcagacagttgggttccagaacaccaggtcatcctgaatttgagttgccaggtgttgaagttactaccggtccattaggtcaaggtatctccaacgctgttggtatggccatggctcaagctaacctggctgccacttacaacaagccgggctttaccttgtctgacaactacacctatgttttcttgggtgacggttgtttgcaagaaggtatttcttcagaagcttcctccttggctggtcatttgaaattgggtaacttgattgccatctacgatgacaacaagatcactatcgatggtgctaccagtatctcattcgatgaagatgttgctaagagatacgaagcctacggttgggaagttttgtacgtagaaaatggtaacgaagatctagccggtattgccaaggctattgctcaagctaagttatccaaggacaaaccaactttgatcaaaatgaccacaaccattggttacggttccttgcatgccggctctcactctgtgcacggtgccccattgaaagcagatgatgttaaacaactaaagagcaaattcggtttcaacccagacaagtcctttgttgttccacaagaagtttacgaccactaccaaaagacaattttaaagccaggtgtcgaagccaacaacaagtggaacaagttgttcagcgaataccaaaagaaattcccagaattaggtgctgaattggctagaagattgagcggccaactacccgcaaattgggaatctaagttgccaacttacaccgccaaggactctgccgtggccactagaaaattatcagaaactgttcttgaggatgtttacaatcaattgccagagttgattggtggttctgccgatttaacaccttctaacttgaccagatggaaggaagcccttgacttccaacctccttcttccggttcaggtaactactctggtagatacattaggtacggtattagagaacacgctatgggtgccataatgaacggtatttcagctttcggtgccaactacaaaccatacggtggtactttcttgaacttcgtttcttatgctgctggtgccgttagattgtccgctttgtctggccacccagttatttgggttgctacacatgactctatcggtgtcggtgaagatggtccaacacatcaacctattgaaactttagcacacttcagatccctaccaaacattcaagtttggagaccagctgatggtaacgaagtttctgccgcctacaagaactctttagaatccaagcatactccaagtatcattgctttgtccagacaaaacttgccacaattggaaggtagctctattgaaagcgcttctaagggtggttacgtactacaagatgttgctaacccagatattattttagtggctactggttccgaagtgtctttgagtgttgaagctgctaagactttggccgcaaagaacatcaaggctcgtgttgtttctctaccagatttcttcacttttgacaaacaacccctagaatacagactatcagtcttaccagacaacgttccaatcatgtctgttgaagttttggctaccacatgttggggcaaatacgctcatcaatccttcggtattgacagatttggtgcctccggtaaggcaccagaagtcttcaagttcttcggtttcaccccagaaggtgttgctgaaagagctcaaaagaccattgcattctataagggtgacaagctaatttctcctttgaaaaaagctttctaa

SEQ ID NO: 753 - DNA, 2046 bp, Saccharomyces cerevisiae
atggcacagttctccgacattgataaacttgcggtttccactttaagattactttccgttgaccaggtggaaagcgcacaatctggccacccaggtgcaccactaggattggcaccagttgcccatgtaattttcaagcaactgcgctgtaaccctaacaatgaacattggatcaatagagacaggtttgttctgtcgaacggtcactcatgcgctcttctgtactcaatgctccatctattaggatacgattactctatcgaggacttgagacaatttagacaagtaaactcaaggacaccgggtcatccagaattccactcagcgggagtggaaatcacttccggtccgctaggccagggtatctcaaatgctgttggtatggcaatagcgcaggccaactttgccgccacttataacgaggatggctttcccatttccgactcatatacgtttgctattgtaggggatggttgcttacaagagggtgtttcttcggagacctcttccttagcgggacatctgcaattgggtaacttgattacgttttatgacagtaatagcatttccattgacggtaaaacctcgtactcgttcgacgaagatgttttgaagcgatacgaggcatatggttgggaagtcatggaagtcgataaaggagacgacgatatggaatccatttctagcgctttggaaaaggcaaaactatcgaaggacaagccaaccataatcaaggtaactactacaattggatttgggtccctacaacagggtactgctggtgttcatgggtccgctttgaaggcagatgatgttaaacagttgaagaagaggtgggggtttgacccaaataaatcatttgtagtacctcaagaggtgtacgattattataagaagactgttgtggaacccggtcaaaaacttaatgaggaatgggataggatgtttgaagaatacaaaaccaaatttcccgagaagggtaaagaattgcaaagaagattgaatggtgagttaccggaaggttgggaaaagcatttaccgaagtttactccggacgacgatgctctggcaacaagaaagacatcccagcaggtgctgacgaacatggtccaagttttgcctgaattgatcggtggttctgccgatttgacaccttcgaatctgacaaggtgggaaggcgcggtagatttccaacctcccattacccaactaggtaactatgcaggaaggtacattagatacggtgtgagggaacacggaatgggtgccattatgaacggtatctctgcctttggtgcaaactacaagccttacggtggtacctttttgaacttcgtctcttatgctgcaggagccgttaggttagccgccttgtctggtaatccagtcatttgggttgcaacacatgactctatcgggcttggtgaggatggtccaacgcaccaacctattgaaactctggctcacttgagggctattccaaacatgcatgtatggagacctgctgatggtaacgaaacttctgctgcgtattattctgctatcaaatctggtcgaacaccatctgttgtggctttatcacgacagaatcttcctcaattggagcattcctcttttgaaaaagccttgaagggtggctatgtgatccatgacgtggagaatcctgatattatcctggtgtcaacaggatcagaagtctccatttctatagatgcagccaaaaaattgtacgatactaaaaaaatcaaagcaagagttgtttccctgccagacttttatacttttgacaggcaaagtgaagaatacagattctctgttctaccagacggtgttccgatcatgtcctttgaagtattggctacttcaagctggggtaagtatgctcatcaatcgttcggactcgacgaatttggtcgttcaggcaaggggcctgaaatttacaaattgttcgatttcacagcggacggtgttgcgtcaagggctgaaaagacaatcaattactacaaaggaaagcagttgctttctcctatgggaagagctttctaa

SEQ ID NO: 754 - DNA, 1500 bp, Saccharomyces cerevisiae; identical to SEQ ID NO: 624

SEQ ID NO: 755 - DNA, 3045 bp, Saccharomyces cerevisiae
atgctaaggttcgtgtcttcgcaaacctgccggtatagttcaagaggactattaaaaacatctttacttaaaaatgcatctactgtcaaaattgtcggaagagggttagccaccactggtacagataattttctatcgacatcaaatgccacctatatcgatgaaatgtaccaagcttggcaaaaagacccatcttcagtccatgtttcatgggacgcatatttcaagaatatgtctaacccaaagattccagctacaaaggcttttcaggctcctcccagtatcagtaactttccccagggtaccgaagcagctcccttagggaccgcaatgactggttcagtagatgagaacgtctccattcatctaaaagtgcaattgctatgtagagcttaccaagttagaggtcatttaaaagcccatatagatcctttagggatctcatttggtagtaataaaaataaccctgttcctccggaattgactctagactactacggctttagcaaacacgatcttgataaagaaatcaacctaggacctggtatcctgccaaggtttgcaagggacgggaaatctaaaatgtctctgaaagagattgtggatcatctagaaaagttatattgttcctcttatggggtacaatacacacatattccatctaagcaaaagtgtgattggttaagagagagaattgagattcctgaaccttaccaatatacagtggaccaaaagagacaaatcttagatagattaacatgggccacttcttttgagtcattcttatctacaaaatttccaaatgataagaggttcggtttagaaggtttggaaagtgttgttccaggtattaaaactttggttgatcgttctgttgaattgggtgtagaagatattgttttgggtatggctcaccgtggtagattgaacgttttatccaatgtggtccgtaaaccaaatgaatctattttttctgaatttaagggttcgagcgctcgcgatgatattgaaggatcgggtgatgtcaagtaccatttgggtatgaactaccaaagaccaactacgtctggtaagtacgtcaatttatcgctggtggcaaatccttctcatttagaatcccaagatccagttgttcttggtagaactagagctttattgcatgccaagaacgatttgaaggaaaaaacaaaggccttaggtgtgttattacatggtgatgctgcttttgctgggcagggtgttgtttatgaaaccatgggtttcttgaccctaccagaatactctactggtggtactattcatgttattacaaacaaccagatcggattcactacggatccaagatttgcaaggtccacaccatatccttccgatttggctaaggccattgatgccccaattttccatgttaacgctaatgacgtggaagctgtgacctttattttcaatttagccgcagaatggagacataagttccacacagatgccataattgatgtcgttggttggagaaaacatggacataatgaaaccgatcagccatcgtttactcaaccattaatgtacaaaaaaattgcaaaacaaaaatctgtcattgacgtctatacggaaaaattgataagtgaaggcacattttctaaaaaagatattgatgagcacaagaaatgggtatggaacttatttgaagatgctttcgaaaaggcaaaggattacgtcccatctcaaagagaatggttaactgctgcctgggaaggattcaaatccccaaaggaattggccactgagatattaccacatgaaccaactaatgttccagagagtactttgaaagaactaggtaaggtactctcttcgtggccagaaggttttgaagtgcacaaaaatctaaagagaattttgaaaaatagaggaaaatctattgagacaggtgaaggcatcgattgggccaccggtgaagcattagcgttcggtacattggttttggatggtcagaacgttagggtttccggtgaagatgtagaaagaggtacattttctcaacgtcatgcagtcttgcatgaccaacaatctgaagccatttacacaccgctaagcactctgaataatgaaaaggcagacttcaccattgcaaattcctcgttatctgagtacggtgtaatgggtttcgaatatggttattcgctaacctccccagattatctagtcatgtgggaggctcaattcggtgactttgcaaatacagcacaggttattattgaccaatttattgccggtggtgaacaaaaatggaagcaacgctctggtttagttttgtctttaccccatggttatgatggccaggggccagaacattcgtctggtagattggaaagattcttgcaactagccaatgaagacccaagatatttcccatctgaagaaaagctacagagacaacatcaggattgtaatttccaggttgtttatccaactacgcctgctaatttattccacattctaaggagacagcaacatcgtcaattccgtaaaccattggcgttattcttttctaaacagctgctgcgtcacccattggccagatcatctctttccgaattcactgaaggcggattccaatggattatcgaagatattgaacatggaaaaagtattggtacgaaagaggaaaccaagagattagttttgctgagtggccaagtgtacactgccctacataaaagacgtgaaagtttgggtgataagaccactgctttcttaaagattgaacagctgcacccattcccatttgctcagctacgtgattcattaaattcttatccaaacttggaagaaattgtttggtgccaggaagagccattgaacatgggttcgtgggcatacacagaaccacgcttacacacaacattaaaagaaacggataaatataaggatttcaaggtcagatactgtggtagaaacccaagtggtgctgttgctgccggtagcaaatcactacatttggccgaagaagatgcctttttgaaagatgttttccaacaatcctaa

SEQ ID NO: 756 - DNA, 1392 bp, Saccharomyces cerevisiae
atgctttccagagcgacgcgtactgcagctgccaaatccttagtaaaatctaaagtggctagaaatgttatggctgcttctttcgtcaagagacatgcttctacaagtttgttcaaacaagctaacaaggtcgaatccttaggttcaatatatttatccggcaagaaaatttcagttgcggcgaatccgttctccataactagcaatcgttttaaatctacctctattgaagttcctccgatggcagagtccctgactgaaggctctttaaaggaatatactaaaaacgttggtgattttattaaggaggacgagctgttggccactattgagaccgataaaattgatattgaggtcaattcgccagtatcaggtactgttacgaagctaaatttcaaaccagaggacactgtcactgttggtgaggagttagctcaggtcgagcctggtgaagcacctgctgagggttctggagaatctaagccagagcctaccgaacaagcggagccatcgcaaggtgtcgccgcaagggaaaactcaagtgaggaaacggcttcaaagaaagaagctgctccaaagaaagaagccgctccaaagaaagaagttacagaaccaaaaaaggctgatcaaccaaagaagaccgtctctaaggcgcaggaacccccagtagcctctaactctttcacaccatttccacgtacagaaaccagggtcaaaatgaaccgtatgagattgaggattgccgaaagattaaaagagtctcaaaacactgctgcttccttaaccacattcaacgaagttgacatgtcagctttgatggaaatgaggaaactgtataaagatgagattattaagaagaccggtactaaattcggattcatgggtcttttctccaaagcatgtaccttggccgccaaggatattccagccgtcaatggtgccattgaaggtgaccagattgtttatcgtgattacacagatatttctgttgctgtggccactccaaagggtttggttacccccgtcgttcgtaatgcagagtcattgagtgttttagatattgagaacgaaattgttcgcttgagtcataaagcgcgtgatggcaaattaaccctagaagatatgacgggtggtactttcaccatatctaatggtggtgtttttggttcattatacggtactcctatcatcaattcaccacaaacagccgtcctaggcttgcatggtgtcaaagagagacctgtcactgttaatggacaaattgtctcaagaccaatgatgtacttggctttgacttatgatcatagattgctagatggtagagaagctgttaccttcttgaagactgttaaagagttgattgaagaccctagaaaaatgttgttatggtga

SEQ ID NO: 757 - DNA, 1521 bp, Saccharomyces cerevisiae
atgccagagtccagattgcagagactagctaatttgaaaataggaactccgcagcagctcagacgcacctccataataggtaccattgggcccaagacaaatagctgcgaggccattactgctctgagaaaagctggtttgaacatcattcgattgaacttttcccatggctcctacgaattccatcaatcagtaatcgaaaatgctgtgaaatcggaacagcaattccctggcaggccgctcgccattgccctggataccaagggtcccgagatcagaacaggtcgcacgttaaatgaccaagatctttatatccccgtagaccaccaaatgatctttaccactgacgcaagttttgcaaacacctccaatgataaaatcatgtatatagactatgctaacctgacaaaagttatcgttccggggagatttatatacgtggacgacgggattctctcttttaaagtgctccaaatcattgacgaatctaatttaagggtgcaagcggtaaactcgggttatatcgcatctcataaaggtgttaatctgcctaataccgacgttgatttgccccccttgtccgccaaagacatgaaggacttgcaattcggagtccgcaatggcattcacatcgtatttgcctctttcataagaacttcagaagatgtgttgtctatcagaaaagcgttgggttctgaagggcaagatatcaagattatatccaagatagaaaaccagcaagggttggataattttgacgaaatcctggaagtcacggatggtgttatgatagcgagaggcgatttaggaattgaaatcctggcacctgaagtattagccattcaaaaaaagctgattgcaaaatgtaatttggcgggcaaacctgtcatttgcgcgactcagatgctggattcaatgacacacaatccgagaccgacaagggctgaagtatcggatgtgggtaacgctgtgttggatggtgctgattgtgttatgctttctggagaaacggcgaagggtgattatccggtgaatgcagttaatattatggcggcgaccgctctgattgctgaaagtactatcgctcatttggctctttatgacgatctcagagacgccactcccaaacctacttccactacggaaactgtagcagctgcagctaccgcagcaatcttggagcaagatggtaaggccatcgttgtattatctactacagggaacacggcaaggctactgtcgaagtatagaccaagctgccctatcatattagtaacaagacacgcaagaacggcaagaattgcgcatttgtatagaggtgttttcccatttctgtatgaaccgaaacgcctagacgactggggtgaggatgttcataggcgcctaaagtttggtgttgaaatggcgaggtctttcggaatggtggacaacggtgatactgttgtttccattcaaggattcaaaggaggagtcggccattccaataccttacgcatttctactgttggtcaagaattctag

SEQ ID NO: 758 - DNA, 1131 bp, Saccharomyces cerevisiae
atgtcaacgtttgggaaactgttccgcgtcaccacatatggtgaatcgcattgtaagtctgtcggttgcattgtcgacggtgttcctccaggaatgtcattaaccgaagctgacattcagccacaattgaccagaagaagaccgggtcaatctaagctatcgacccctagagacgaaaaggatagagtggaaatccagtccggtaccgagttcggcaagactctaggtacacccatcgccatgatgatcaaaaacgaggaccaaagacctcacgactactccgacatggacaagttccctagaccttcccatgcggacttcacgtactcggaaaagtacggtatcaaggcctcctctggtggtggcagagcttctgctagagaaacgattggccgtgtcgcttcaggtgccattgctgagaagttcttagctcagaactctaatgtcgagatcgtagcctttgtgacacaaatcggggaaatcaagatgaacagagactctttcgatcctgaatttcagcatctgttgaacaccatcaccagggaaaaagtggactcaatgggtcctatcagatgtccagacgcctccgttgctggtttgatggtcaaggaaatcgaaaagtacagaggcaacaaggactctatcggtggtgtcgtcacttgtgtcgtgagaaacttgcctaccggtctcggtgagccatgctttgacaagttggaagccatgttggctcatgctatgttgtccattccagcatccaagggtttcgaaattggctcaggttttcagggtgtctctgttccagggtccaagcacaatgacccattttactttgaaaaagaaacaaacagattaagaacaaagaccaacaattcaggtggtgtacaaggtggtatctctaatggtgagaacatctatttctctgtcccattcaagtcagtggccactatctctcaagaacaaaaaaccgccacttacgatggtgaagaaggtatcttagccgctaagggtagacatgaccctgctgtcactccaagagctattcctattgtggaagccatgaccgctctggtgttggctgacgcgcttttgatccaaaaggcaagagatttctccagatccgtggttcattaa

SEQ ID NO: 759 - DNA, 1758 bp, Saccharomyces cerevisiae; identical to SEQ ID NO: 699

SEQ ID NO: 760 - DNA, 2592 bp, Saccharomyces cerevisiae
atgccatctgctagcttactcgtctcgacaaagagacttaacgcttccaaattccaaaaatttgtgtcttcattaaacaaatccaccatagcaggatttgcatctgtacccttgagagctccaccatccgttgcatttacgagaaagaaagtcggatactcaaagaggtatgtttcatctactaacggcttttcagctactagatccactgtgatccaactgttgaacaatatcagcacaaaaagagaggttgaacaatatttgaaatatttcacttccgtctcacaacaacaatttgctgtgatcaaggtgggtggtgccattatcagcgacaatctacacgaactcgcttcctgcttggcatttttgtatcatgttggtctatatccaatagttttacatggtaccggtcctcaggttaatggaaggctagaagcgcagggaattgagccagactatattgatggtattagaatcacggatgagcacacaatggccgtagttagaaaatgttttttggaacaaaatcttaagctagttactgcattagaacagctaggggtccgtgcaagacccattacttctggtgtttttactgctgactatttggataaggacaaatacaagctagtgggcaatattaaaagtgtcacaaaagagccaattgaagcatctattaaggcaggtgccctaccaatcttgacctctttagccgaaactgcttctggtcaaatgttgaacgtcaacgccgacgtagctgctggtgaattagcccgtgtttttgagcctttgaagatcgtttacctgaatgagaaagggggtattatcaatggctccacgggagaaaaaatttcgatgatcaatttggatgaagagtatgacgatttaatgaagcaaagttgggtgaagtatggtaccaaattaaaaattagagaaattaaagagcttttggactatcttcctcgttcttcttcagttgcaatcattaacgttcaagatctacaaaaagaactgttcactgattctggtgcgggtactatgatcaggagaggttacaaattagtgaagagatcctccattggcgaatttccatccgctgatgctctaagaaaagctcttcaaagggacgctggcattagttccggtaaagaatctgttgcttcttatttaagatatttggaaaactctgattttgtctcttatgctgatgaacctcttgaagcagtggccattgtaaagaaagatacgaacgttcccacactagacaaatttgtctgttctgacgcagcctggttgaataacgtcacagataatgtattcaatgttttgcgccgtgattttcctgctttacaatgggtagtcagtgaaaatgatgctaacattgcatggcattttgataagtctcaaggttcatatctaaaaggcggaaaagttttgttctggtatggtatcgatgatataaatacaatatccgagctcgttgaaaattttgtgaagtcgtgtgacactgcttctaccctcaactcatcagcaagtagtggagtatttgctaacaaaaaatcagctaggtcgtactcaactagatccactcctcgtcccgagggagttaacaccaaccctggtcgtgtcgcgcttattggtgctagaggttacacaggtaaaaatttggtatctttgatcaacggccacccatatttagaagtggcccatgtttcttctcgtgaattgaaaggtcaaaagttgcaagattatacaaaatccgaaattatatatgaaagtttgcaaatacaggatattaggaaactggaagaacaaaatgctgtggacttttgggttatggcattacccaacaaagtctgtgaacctttcgttgagacaatccaaagtgttcatggtaagtctaaaattattgatctgtccgctgatcacaggtttgtatcagaatcagactgggcttacggtttgccagaattgaatgatagagcaaaaattgcaaacgctgccaaaattgctaatcccggttgttatgctactggttcgcaattaactatttctccgttaacaaagtatatcaatggtcttccaactgtgtttggtgtttcagggtattcaggcgcggggacgaagccttctccaaaaaacgatcccaaattcttgaacaataacttaattccttacgctttaagtgatcatatacacgaacgcgaaatctcagctcgcattgggcacaatgttgcattcatgccccatgttgggcagtggtttcaaggtatctctttgaccgtctctattccaataaaaaaaggttccttgtctattgatgagatcaggaaattatacagaaatttttacgaagacgaaaagctagtacatgtcatcgatgatatcccactggttaaagatattgagggcacccatggtgtagttattggtggtttcaagctgaatgatgctgaagatcgtgtagttgtttgcgcaaccatcgataacttacttaaaggcgccgctactcaatgtctgcaaaatattaatcttgctatgggttatggagagtatgctggtatccctgaaaataaaattattggtgtctga

SEQ ID NO: 761 - DNA, 1326 bp, Saccharomyces cerevisiae
atgagaatatcatcaacattgcttcaacgctcgaagcagcttatagataagtatgcattatacgtgcccaagacgggctcttttcctaaaggatttgaagtaggctacactgcatctggagtcaaaaaaaacgggagcctggacctgggtgtaatcttgaataccaataaatctcgtccttcaaccgcagcagctgttttcacgaccaataaattcaaagctgcgccagttttgacatcgaaaaaagtccttgaaactgctcgtggtaaaaacatcaacgctattgtagtcaattccggttgtgctaactcggtcacaggtgatcttggtatgaaagatgcccaagtaatgattgatttggttaacgataaaattggtcaaaaaaattctaccctagtcatgtctacaggcgttattggacaacgactacagatggacaagatcagcactggtatcaataaaatttttggagaagaaaagttcggcagtgattttaactcttggttgaacgtagccaaatcaatctgtactactgatactttcccaaaattagttacatctagattcaaattacctagtggtactgagtatactttgacaggtatggcaaagggcgcgggtatgatttgtccgaatatggctaccttattaggtttcatagttacagatcttcctattgaaagcaaggcgttgcagaagatgctgactttcgctactacccgttcatttaattgtatatcggtggacggtgatatgagcaccaatgacacaatttgcatgttggccaacggtgctattgacaccaaagaaattaacgaagactctaaagattttgaacaagtaaaattgcaggtcacagaatttgctcagcgcttggcccagttagtcgttcgcgatggtgaaggttcgacaaagtttgttactgttaacgttaaaaatgctttgcattttgaagacgccaaaataattgctgaatcaatctcaaactctatgttggtcaaaaccgcactatatgggcaagatgccaattggggaagaatattgtgcgcgatcgggtatgcaaagctgaatgacttaaaatctctagatgtcaacaaaattaatgttagctttattgctaccgacaattcagaacctcgtgagctgaagcttgtcgctaatggtgtgccacaattggagatcgatgaaacaagggcttctgaaatattggctttgaatgatttggaagtgtctgtcgacttgggaaccggtgatcaggcagcacaattttggacttgtgatttatcacatgaatatgtaacaattaacggtgattaccgttcataa

SEQ ID NO: 762 - DNA, 1284 bp, Saccharomyces cerevisiae; identical to SEQ ID NO: 643

SEQ ID NO: 763 - DNA, 957 bp, Saccharomyces cerevisiae; identical to SEQ ID NO: 644

SEQ ID NO: 764 - DNA, 984 bp, Saccharomyces cerevisiae; identical to SEQ ID NO: 646

SEQ ID NO: 765 - DNA, 1431 bp, Saccharomyces cerevisiae
atctgtgaaaatttggacattcacccatcgaaagtagaattagggaagttttctaatggggaaacgaacattgctcttcgcgaatctgttcgtgaaaaggatgtatatatcatccagagtggttgtggccaggtgaacgacacgttcatgcagttgctgattttaatcagtgcctgcaagtccgcttctgcctcgagggttacagccgtaatgccatatctctgctactcgagacagccagatattccatatactgccaagggtgctcccataatttccaagcctaaagaaaactatacttttgaatcgcatccaggcacacccgtgtcatcttctttaatgacgcaaagaccaggtgctgagagctcgttgaagagtttggatagtgcaatacgatcaactatcaacttagaaaatcctcaacctatcagaacaccaaacagcagtgctacggcgaataacaatttcgacatcaagaagacgctttctttttcaagaattcctatgattcccggtggtaagttacaaaatacaagcaatagcacggacgctggtgaattgttcaacgctcaaaatgcaggctataagctatgggtagtacaagccggtactttgattgctcatttgttgagtgctgcaggtgctgaccatgtgatcacaatggatttgcacgatccacagttccctgggttttttgacattccagtggataatctctactgtaaacccattgcacaaaactacatccagcatcgcattccagattatcaggatgctgtgatcgtttctccagatgctggtggtgcaaagagagctacggctattgcagacgccttggaattgtccttcgccctaattcataaagaaagaagatctcagttattgaagggccctccagatgcgacgttaacctctggtggttcgttaccagtatctccaaggccattagttactactttggtttcctcccaaaatactacttcttcaggtgccactggggttgcggcccttgaaatgaagaaaacaacttcaacatcttccacctcgtcgcaatcttctaattcgtccaagttcgttcaaactaccatgcttgttggcgatgttagaaacaaggtgtgtattatagtcgacgacttggtggatacttcatacactattacaagagctgcgaaattgttgaaggatcaaggatctaccaaagtttatgccttaataacgcacggtgttttttccggtgatgcgctagaaagaatcggccaaagtagtatagataagttgatcatttctaacacggttcctcaagatagaacactacagtacctaggtaaggacagagtggatgttattgatgtctcctgcataatcggtgaagcaattagaagaatccataacggtgaatccatttctatgttgttcgagcatggatggtag

SEQ ID NO: 766 - DNA, 1143 bp, Saccharomyces cerevisiae; identical to SEQ ID NO: 668

SEQ ID NO: 767 - DNA, 663 bp, Escherichia coli
atgaaagacatagatacactcatcagcaacaatgcactatggtcaaaaatgctggtggaagaggatcccgggttttttgagaaactggcacaagcgcaaaaaccgcgctttctatggattggatgttccgacagtcgcgttcctgcagaacgtttaaccggtcttgagccgggcgaactctttgttcaccgtaatgttgctaacctggtcattcacactgacctgaactgcctttccgtggttcagtatgcagtggatgtactcgaagttgaacacattattatctgtggccactacggttgcggcggcgtacaagccgcagttgaaaacccggaactggggcttatcaacaactggctgctgcatatccgcgatatctggttcaaacatagctcattgctcggcgaaatgccgcaagagcgccgtctggataccttgtgtgaactgaacgtcatggaacaggtgtataacctgggccactccaccattatgcaatcagcgtggaaacgcgggcagaaagttaccattcacggctgggcctacggcattcacgacggcttgctgcgtgatctggatgttaccgccaccaaccgcgaaacccttgagcaacgttaccgtcacgggatttccaacctcaagctgaaacacgccaaccacaaataa

SEQ ID NO: 768 - protein, 220 aa, Escherichia coli
MKDIDTLISNNALWSKMLVEEDPGFFEKLAQAQKPRFLWIGCSDSRVPAERLTGLEPGELFVHRNVANLVIHTDLNCLSVVQYAVDVLEVEHIIICGHYGCGGVQAAVENPELGLINNWLLHIRDIWFKHSSLLGEMPQERRLDTLCELNVMEQVYNLGHSTIMQSAWKRGQKVTIHGWAYGIHDGLLRDLDVTATNRETLEQRYRHGISNLKLKHANHK

SEQ ID NO: 769 - DNA, 780 bp, Escherichia coli
atgggttttctttccggtaagcgcattctggtaaccggtgttgccagcaaactatccatcgcctacggtatcgctcaggcgatgcaccgcgaaggagctgaactggcattcacctaccagaacgacaaactgaaaggccgcgtagaagaatttgccgctcaattgggttctgacatcgttctgcagtgcgatgttgcagaagatgccagcatcgacaccatgttcgctgaactggggaaagtttggccgaaatttgacggtttcgtacactctattggttttgcacctggcgatcagctggatggtgactatgttaacgccgttacccgtgaaggcttcaaaattgcccacgacatcagctcctacagcttcgttgcaatggcaaaagcttgccgctccatgctgaatccgggttctgccctgctgaccctttcctaccttggcgctgagcgcgctatcccgaactacaacgttatgggtctggcaaaagcgtctctggaagcgaacgtgcgctatatggcgaacgcgatgggtccggaaggtgtgcgtgttaacgccatctctgctggtccgatccgtactctggcggcctccggtatcaaagacttccgcaaaatgctggctcattgcgaagccgttaccccgattcgccgtaccgttactattgaagatgtgggtaactctgcggcattcctgtgctccgatctctctgccggtatcttcggtgaagtggtccacgttgacggcggtttcagcattgctgcaatgaacgaactcgaa

SEQ ID NO: 770 - protein, 262 aa, Escherichia coli
MGFLSGKRILVTGVASKLSIAYGIAQAMHREGAELAFTYQNDKLKGRVEEFAAQLGSDIVLQCDVAEDASIDTMFAELGKVWPKFDGFVHSIGFAPGDQLDGDYVNAVTREGFKIAHDISSYSFVAMAKACRSMLNPGSALLTLSYLGAERAIPNYNVMGLAKASLEANVRYMANAMGPEGVRVNAISAGPIRTLAASGIKDFRKMLAHCEAVTPIRRTVTIEDVGNSAAFLCSDLSAGIFGEVVHVDGGFSIAAMNELELK

SEQ ID NO: 771 - DNA, 960 bp, Escherichia coli
atgagtctgaatttccttgattttgaacagccgattgcagagctggaagcgaaaatcgattctctgactgcggttagccgtcaggatgagaaactggatattaacatcgatgaagaagtgcatcgtctgcgtgaaaaaagcgtagaactgacacgtaaaatcttcgccgatctcggtgcatggcagattgcgcaactggcacgccatccacagcgtccttataccctggattacgttcgcctggcatttgatgaatttgacgaactggctggcgaccgcgcgtatgcagacgataaagctatcgtcggtggtatcgcccgtctcgatggtcgtccggtgatgatcattggtcatcaaaaaggtcgtgaaaccaaagaaaaaattcgccgtaactttggtatgccagcgccagaaggttaccgcaaagcactgcgtctgatgcaaatggctgaacgctttaagatgcctatcatcacctttatcgacaccccgggggcttatcctggcgtgggcgcagaagagcgtggtcagtctgaagccattgcacgcaacctgcgtgaaatgtctcgcctcggcgtaccggtagtttgtacggttatcggtgaaggtggttctggcggtgcgctggcgattggcgtgggcgataaagtgaatatgctgcaatacagcacctattccgttatctcgccggaaggttgtgcgtccattctgtggaagagcgccgacaaagcgccgctggcggctgaagcgatgggtatcattgctccgcgtctgaaagaactgaaactgatcgactccatcatcccggaaccactgggtggtgctcaccgtaacccggaagcgatggcggcatcgttgaaagcgcaactgctggcggatctggccgatctcgacgtgttaagcactgaagatttaaaaaatcgtcgttatcagcgcctgatgagctacggttacgcgtaa

SEQ ID NO: 772 - protein, 319 aa, Escherichia coli
MSLNFLDFEQPIAELEAKIDSLTAVSRQDEKLDINIDEEVHRLREKSVELTRKIFADLGAWQIAQLARHPQRPYTLDYVRLAFDEFDELAGDRAYADDKAIVGGIARLDGRPVMIIGHQKGRETKEKIRRNFGMPAPEGYRKALRLMQMAERFKMPIITFIDTPGAYPGVGAEERGQSEAIARNLREMSRLGVPVVCTVIGEGGSGGALAIGVGDKVNMLQYSTYSVISPEGCASILWKSADKAPLAAEAMGIIAPRLKELKLIDSIIPEPLGGAHRNPEAMAASLKAQLLADLADLDVLSTEDLKNRRYQRLMSYGYA

SEQ ID NO: 773 - DNA, 471 bp, Escherichia coli
atggatattcgtaagattaaaaaactgatcgagctggttgaagaatcaggcatctccgaactggaaatttctgaaggcgaagagtcagtacgcattagccgtgcagctcctgccgcaagtttccctgtgatgcaacaagcttacgctgcaccaatgatgcagcagccagctcaatctaacgcagccgctccggcgaccgttccttccatggaagcgccagcagcagcggaaatcagtggtcacatcgtacgttccccgatggttggtactttctaccgcaccccaagcccggacgcaaaagcgttcatcgaagtgggtcagaaagtcaacgtgggcgataccctgtgcatcgttgaagccatgaaaatgatgaaccagatcgaagcggacaaatccggtaccgtgaaagcaattctggtcgaaagtggacaaccggtagaatttgacgagccgctggtcgtcatcgagtaa

SEQ ID NO: 774 - protein, 156 aa, Escherichia coli
MDIRKIKKLIELVEESGISELEISEGEESVRISRAAPAASFPVMQQAYAAPMMQQPAQSNAAAPATVPSMEAPAAAEISGHIVRSPMVGTFYRTPSPDAKAFIEVGQKVNVGDTLCIVEAMKMMNQIEADKSGTVKAILVESGQPVEFDEPLVVIE

SEQ ID NO: 775 - DNA, 1350 bp, Escherichia coli
atgctggataaaattgttattgccaaccgcggcgagattgcattgcgtattcttcgtgcctgtaaagaactgggcatcaagactgtcgctgtgcactccagcgcggatcgcgatctaaaacacgtattactggcagatgaaacggtctgtattggccctgctccgtcagtaaaaagttatctgaacatcccggcaatcatcagcgccgctgaaatcaccggcgcagtagcaatccatccgggttacggcttcctctccgagaacgccaactttgccgagcaggttgaacgctccggctttatcttcattggcccgaaagcagaaaccattcgcctgatgggcgacaaagtatccgcaatcgcggcgatgaaaaaagcgggcgtcccttgcgtaccgggttctgacggcccgctgggcgacgatatggataaaaaccgtgccattgctaaacgcattggttatccggtgattatcaaagcctccggcggcggcggcggtcgcggtatgcgcgtagtgcgcggcgacgctgaactggcacaatccatctccatgacccgtgcggaagcgaaagctgctttcagcaacgatatggtttacatggagaaatacctggaaaatcctcgccacgtcgagattcaggtactggctgacggtcagggcaacgctatctatctggcggaacgtgactgctccatgcaacgccgccaccagaaagtggtcgaagaagcgccagcaccgggcattaccccggaactgcgtcgctacatcggcgaacgttgcgctaaagcgtgtgttgatatcggctatcgcggtgcaggtactttcgagttcctgttcgaaaacggcgagttctatttcatcgaaatgaacacccgtattcaggtagaacacccggttacagaaatgatcaccggcgttgacctgatcaaagaacagctgcgtatcgctgccggtcaaccgctgtcgatcaagcaagaagaagttcacgttcgcggccatgcggtggaatgtcgtatcaacgccgaagatccgaacaccttcctgccaagtccgggcaaaatcacccgtttccacgcacctggcggttttggcgtacgttgggagtctcatatctacgcgggctacaccgtaccgccgtactatgactcaatgatcggtaagctgatttgctacggtgaaaaccgtgacgtggcgattgcccgcatgaagaatgcgctgcaggagctgatcatcgacggtatcaaaaccaacgttgatctgcagatccgcatcatgaatgacgagaacttccagcatggtggcactaacatccactatctggagaaaaaactcggtcttcaggaaaaataa

SEQ ID NO: 776 - protein, 449 aa, Escherichia coli
MLDKIVIANRGEIALRILRACKELGIKTVAVHSSADRDLKHVLLADETVCIGPAPSVKSYLNIPAIISAAEITGAVAIHPGYGFLSENANFAEQVERSGFIFIGPKAETIRLMGDKVSAIAAMKKAGVPCVPGSDGPLGDDMDKNRAIAKRIGYPVIIKASGGGGGRGMRVVRGDAELAQSISMTRAEAKAAFSNDMVYMEKYLENPRHVEIQVLADGQGNAIYLAERDCSMQRRHQKVVEEAPAPGITPELRRYIGERCAKACVDIGYRGAGTFEFLFENGEFYFIEMNTRIQVEHPVTEMITGVDLIKEQLRIAAGQPLSIKQEEVHVRGHAVECRINAEDPNTFLPSPGKITRFHAPGGFGVRWESHIYAGYTVPPYYDSMIGKLICYGENRDVAIARMKNALQELIIDGIKTNVDLQIRIMNDENFQHGGTNIHYLEKKLGLQEK

SEQ ID NO: 777 - DNA, 915 bp, Escherichia coli
atgagctggattgaacgaattaaaagcaacattactcccacccgcaaggcgagcattcctgaaggggtgtggactaagtgtgatagctgcggtcaggttttataccgcgctgagctggaacgtaatcttgaggtctgtccgaagtgtgaccatcacatgcgtatgacagcgcgtaatcgcctgcatagcctgttagatgaaggaagccttgtggagctgggtagcgagcttgagccgaaagatgtgctgaagtttcgtgactccaagaagtataaagaccgtctggcatctgcgcagaaagaaaccggcgaaaaagatgcgctggtggtgatgaaaggcactctgtatggaatgccggttgtcgctgcggcattcgagttcgcctttatgggcggttcaatggggtctgttgtgggtgcacgtttcgtgcgtgccgttgagcaggcgctggaagataactgcccgctgatctgcttctccgcctctggtggcgcacgtatgcaggaagcactgatgtcgctgatgcagatggcgaaaacctctgcggcactggcaaaaatgcaggagcgcggcttgccgtacatctccgtgctgaccgacccgacgatgggcggtgtttctgcaagtttcgccatgctgggcgatctcaacatcgctgaaccgaaagcgttaatcggctttgccggtccgcgtgttatcgaacagaccgttcgcgaaaaactgccgcctggattccagcgcagtgaattcctgatcgagaaaggcgcgatcgacatgatcgtccgtcgtccggaaatgcgcctgaaactggcgagcattctggcgaagttgatgaatctgccagcgccgaatcctgaagcgccgcgtgaaggcgtagtggtacccccggtaccggatcaggaacctgaggcctga

SEQ ID NO: 778 - protein, 304 aa, Escherichia coli
MSWIERIKSNITPTRKASIPEGVWTKCDSCGQVLYRAELERNLEVCPKCDHHMRMTARNRLHSLLDEGSLVELGSELEPKDVLKFRDSKKYKDRLASAQKETGEKDALVVMKGTLYGMPVVAAAFEFAFMGGSMGSVVGARFVRAVEQALEDNCPLICFSASGGARMQEALMSLMQMAKTSAALAKMQERGLPYISVLTDPTMGGVSASFAMLGDLNIAEPKALIGFAGPRVIEQTVREKLPPGFQRSEFLIEKGAIDMIVRRPEMRLKLASILAKLMNLPAPNPEAPREGVVVPPVPDQEPEA

SEQ ID NO: 779 - DNA, 1533 bp, Escherichia coli
atgcgaattggcataccaagagaacggttaaccaatgaaacccgtgttgcagcaacgccaaaaacagtggaacagctgctgaaactgggttttaccgtcgcggtagagagcggcgcgggtcaactggcaagttttgacgataaagcgtttgtgcaagcgggcgctgaaattgtagaagggaatagcgtctggcagtcagagatcattctgaaggtcaatgcgccgttagatgatgaaattgcgttactgaatcctgggacaacgctggtgagttttatctggcctgcgcagaatccggaattaatgcaaaaacttgcggaacgtaacgtgaccgtgatggcgatggactctgtgccgcgtatctcacgcgcacaatcgctggacgcactaagctcgatggcgaacatcgccggttatcgcgccattgttgaagcggcacatgaatttgggcgcttctttaccgggcaaattactgcggccgggaaagtgccaccggcaaaagtgatggtgattggtgcgggtgttgcaggtctggccgccattggcgcagcaaacagtctcggcgcgattgtgcgtgcattcgacacccgcccggaagtgaaagaacaagttcaaagtatgggcgcggaattcctcgagctggattttaaagaggaagctggcagcggcgatggctatgccaaagtgatgtcggacgcgttcatcaaagcggaaatggaactctttgccgcccaggcaaaagaggtcgatatcattgtcaccaccgcgcttattccaggcaaaccagcgccgaagctaattacccgtgaaatggttgactccatgaaggcgggcagtgtgattgtcgacctggcagcccaaaacggcggcaactgtgaatacaccgtgccgggtgaaatcttcactacggaaaatggtgtcaaagtgattggttataccgatcttccgggccgtctgccgacgcaatcctcacagctttacggcacaaacctcgttaatctgctgaaactgttgtgcaaagagaaagacggcaatatcactgttgattttgatgatgtggtgattcgcggcgtgaccgtgatccgtgcgggcgaaattacctggccggcaccgccgattcaggtatcagctcagccgcaggcggcacaaaaagcggcaccggaagtgaaaactgaggaaaaatgtacctgctcaccgtggcgtaaatacgcgttgatggcgctggcaatcattctttttggctggatggcaagcgttgcgccgaaagaattccttgggcacttcaccgttttcgcgctggcctgcgttgtcggttattacgtggtgtggaatgtatcgcacgcgctgcatacaccgttgatgtcggtcaccaacgcgatttcagggattattgttgtcggagcactgttgcagattggccagggcggctgggttagcttccttagttttatcgcggtgcttatagccagcattaatattttcggtggcttcaccgtgactcagcgcatgctgaaaatgttccgcaaaaattaa

SEQ ID NO: 780 - protein, 510 aa, Escherichia coli
MRIGIPRERLTNETRVAATPKTVEQLLKLGFTVAVESGAGQLASFDDKAFVQAGAEIVEGNSVWQSEIILKVNAPLDDEIALLNPGTTLVSFIWPAQNPELMQKLAERNVTVMAMDSVPRISRAQSLDALSSMANIAGYRAIVEAAHEFGRFFTGQITAAGKVPPAKVMVIGAGVAGLAAIGAANSLGAIVRAFDTRPEVKEQVQSMGAEFLELDFKEEAGSGDGYAKVMSDAFIKAEMELFAAQAKEVDIIVTTALIPGKPAPKLITREMVDSMKAGSVIVDLAAQNGGNCEYTVPGEIFTTENGVKVIGYTDLPGRLPTQSSQLYGTNLVNLLKLLCKEKDGNITVDFDDVVIRGVTVIRAGEITWPAPPIQVSAQPQAAQKAAPEVKTEEKCTCSPWRKYALMALAIILFGWMASVAPKEFLGHFTVFALACVVGYYVVWNVSHALHTPLMSVTNAISGIIVVGALLQIGQGGWVSFLSFIAVLIASINIFGGFTVTQRMLKMFRKN

SEQ ID NO: 781 - DNA, 1389 bp, Escherichia coli
atgtctggaggattagttacagctgcatacattgttgccgcgatcctgtttatcttcagtctggccggtctttcgaaacatgaaacgtctcgccagggtaacaacttcggtatcgccgggatggcgattgcgttaatcgcaaccatttttggaccggatacgggtaatgttggctggatcttgctggcgatggtcattggtggggcaattggtatccgtctggcgaagaaagttgaaatgaccgaaatgccagaactggtggcgatcctgcatagcttcgtgggtctggcggcagtgctggttggctttaacagctatctgcatcatgacgcgggaatggcaccgattctggtcaatattcacctgacggaagtgttcctcggtatcttcatcggggcggtaacgttcacgggttcggtggtggcgttcggcaaactgtgtggcaagatttcgtctaaaccattgatgctgccaaaccgtcacaaaatgaacctggcggctctggtcgtttccttcctgctgctgattgtatttgttcgcacggacagcgtcggcctgcaagtgctggcattgctgataatgaccgcaattgcgctggtattcggctggcatttagtcgcctccatcggtggtgcagatatgccagtggtggtgtcgatgctgaactcgtactccggctgggcggctgcggctgcgggctttatgctcagcaacgacctgctgattgtgaccggtgcgctggtcggttcttcgggggctatcctttcttacattatgtgtaaggcgatgaaccgttcctttatcagcgttattgcgggtggtttcggcaccgacggctcttctactggcgatgatcaggaagtgggtgagcaccgcgaaatcaccgcagaagagacagcggaactgctgaaaaactcccattcagtgatcattactccggggtacggcatggcagtcgcgcaggcgcaatatcctgtcgctgaaattactgagaaattgcgcgctcgtggtattaatgtgcgtttcggtatccacccggtcgcggggcgtttgcctggacatatgaacgtattgctggctgaagcaaaagtaccgtatgacatcgtgctggaaatggacgagatcaatgatgactttgctgataccgataccgtactggtgattggtgctaacgatacggttaacccggcggcgcaggatgatccgaagagtccgattgctggtatgcctgtgctggaagtgtggaaagcgcagaacgtgattgtctttaaacgttcgatgaacactggctatgctggtgtgcaaaacccgctgttcttcaaggaaaacacccacatgctgtttggtgacgccaaagccagcgtggatgcaatcctgaaagctctgtaa

SEQ ID NO: 782 - protein, 462 aa, Escherichia coli
MSGGLVTAAYIVAAILFIFSLAGLSKHETSRQGNNFGIAGMAIALIATIFGPDTGNVGWILLAMVIGGAIGIRLAKKVEMTEMPELVAILHSFVGLAAVLVGFNSYLHHDAGMAPILVNIHLTEVFLGIFIGAVTFTGSVVAFGKLCGKISSKPLMLPNRHKMNLAALVVSFLLLIVFVRTDSVGLQVLALLIMTAIALVFGWHLVASIGGADMPVVVSMLNSYSGWAAAAAGFMLSNDLLIVTGALVGSSGAILSYIMCKAMNRSFISVIAGGFGTDGSSTGDDQEVGEHREITAEETAELLKNSHSVIITPGYGMAVAQAQYPVAEITEKLRARGINVRFGIHPVAGRLPGHMNVLLAEAKVPYDIVLEMDEINDDFADTDTVLVIGANDTVNPAAQDDPKSPIAGMPVLEVWKAQNVIVFKRSMNTGYAGVQNPLFFKENTHMLFGDAKASVDAILKAL

SEQ ID NO: 783 - protein, 1220 aa, Chloroflexus aurantiacus
MSGTGRLAGKIALITGGAGNIGSELTRRFLAEGATVIISGRNRAKLTALAERMQAEAGVPAKRIDLEVMDGSDPVAVRAGIEAIVARHGQIDILVNNAGSAGAQRRLAEIPLTEAELGPGAEETLHASIANLLGMGWHLMRIAAPHMPVGSAVINVSTIFSRAEYYGRIPYVTPKAALNALSQLAARELGARGIRVNTIFPGPIESDRIRTVFQRMDQLKGRPEGDTAHHFLNTMRLCRANDQGALERRFPSVGDVADAAVFLASAESAALSGETIEVTHGMELPACSETSLLARTDLRTIDASGRTTLICAGDQIEEVMALTGMLRTCGSEVIIGFRSAAALAQFEQAVNESRRLAGADFTPPIALPLDPRDPATIDAVFDWGAGENTGGIHAAVILPATSHEPAPCVIEVDDERVLNFLADEITGTIVIASRLARYWQSQRLTPGARARGPRVIFLSNGADQNGNVYGRIQSAAIGQLIRVWRHEAELDYQRASAAGDHVLPPVWANQIVRFANRSLEGLEFACAWTAQLLHSQRHINEITLNIPANISATTGARSASVGWAESLIGLHLGKVALITGGSAGIGGQIGRLLALSGARVMLAARDRHKLEQMQAMIQSELAEVGYTDVEDRVHIAPGCDVSSEAQLADLVERTLSAFGTVDYLINNAGIAGVEEMVIDMPVEGWRHTLFANLISNYSLMRKLAPLMKKQGSGYILNVSSYFGGEKDAAIPYPNRADYAVSKAGQRAMAEVFARFLGPEIQINAIAPGPVEGDRLRGTGERPGLFARRARLILENKRLNELHAALIAAARTDERSMHELVELLLPNDVAALEQNPAAPTALRELARRFRSEGDPAASSSSALLNRSIAAKLLARLHNGGYVLPADIFANLPNPPDPFFTRAQIDREARKVRDGIMGMLYLQRMPTEFDVAMATVYYLADRNVSGETFHPSGGLRYERTPTGGELFGLPSPERLAELVGSTVYLIGEHLTEHLNLLARAYLERYGARQVVMIVETETGAETMRRLLHDHVEAGRLMTIVAGDQIEAAIDQAITRYGRPGPVVCTPFRPLPTVPLVGRKDSDWSTVLSEAEFAELCEHQLTHHFRVARKIALSDGASLALVTPETTATSTTEQFALANFIKTTLHAFTATIGVESERTAQRILINQVDLTRRARAEEPRDPHERQQELERFIEAVLLVTAPLPPEADTRYAGRIHRGRAITV

SEQ ID NO: 784 - protein, 1219 aa, Chloroflexus aurantiacus
MSGTGRLAGKIALITGGAGNIGSELTRRFLAEGATVIISGRNRAKLTALAERMQAEAGVPAKRIDLEVMDGSDPVAVRAGIEAIVARHGQIDILVNNAGSAGAQRRLAEIPLTEAELGPGAEETLHASIANLLGMGWHLMRIAAPHMPVGSAVINVSTIFSRAEYYGRIPYVTPKAALNALSQLAARELGARGIRVNTIFPGPIESDRIRTVFQRMDQLKGRPEGDTAHHFLNTMRLCRANDQGALERRFPSVGDVADAAVFLASAESAALSGETIEVTHGMELPACSETSLLARTDLRTIDASGRTTLICAGDQIEEVMALTGMLRTCGSEVIIGFRSAAALAQFEQAVNESRRLAGADFTPPIALPLDPRDPATIDAVFDWAGENTGGIHAAVILPATSHEPAPCVIEVDDERVLNFLADEITGTIVIASRLARYWQSQRLTPGARARGPRVIFLSNGADQNGNVYGRIQSAAIGQLIRVWRHEAELDYQRASAAGDHVLPPVWANQIVRFANRSLEGLEFACAWTAQLLHSQRHINEITLNIPANISATTGARSASVGWAESLIGLHLGKVALITGGSAGIGGQIGRLLALSGARVMLAARDRHKLEQMQAMIQSELAEVGYTDVEDRVHIAPGCDVSSEAQLADLVERTLSAFGTVDYLINNAGIAGVEEMVIDMPVEGWRHTLFANLISNYSLMRKLAPLMKKQGSGYILNVSSYFGGEKDAAIPYPNRADYAVSKAGQRAMAEVFARFLGPEIQINAIAPGPVEGDRLRGTGERPGLFARRARLILENKRLNELHAALIAAARTDERSMHELVELLLPNDVAALEQNPAAPTALRELARRFRSEGDPAASSSSALLNRSIAAKLLARLHNGGYVLPADIFANLPNPPDPFFTRAQIDREARKVRDGIMGMLYLQRMPTEFDVAMATVYYLADRNVSGETFHPSGGLRYERTPTGGELFGLPSPERLAELVGSTVYLIGEHLTEHLNLLARAYLERYGARQVVMIVETETGAETMRRLLHDHVEAGRLMTIVAGDQIEAAIDQAITRYGRPGPVVCTPFRPLPTVPLVGRKDSDWSTVLSEAEFAELCEHQLTHHFRVARKIALSDGASLALVTPETTATSTTEQFALANFIKTTLHAFTATIGVESERTAQRILINQVDLTRRARAEEPRDPHERQQELERFIEAVLLVTAPLPPEADTRYAGRIHRGRAITV

SEQ ID NO: 785 - protein, 1219 aa, Chloroflexus aggregans
MSVTGRLAGKIALITGGAGNIGSEMTRRFLAEGATVIISGRNSAKLAALAERLRSEAGVPAKRIDLEVMDGSDPAAVRAGVAAIIGRHGHIDILVNNAGSTGAQRRLAEIPLNETDRDLDDEEALSTSVANLLGMAWHLMRILSPHMPPGSAIINISTIFSRAEYYGRIPYVVPKAALNTLTQIAARELGIRGIRVNTIFPGPIESERIQTVFQRMDQLKGRPEGDTASQFLATMRLYRANDQGQLERRFPTICDVADAAVFLASDEAAALTGETIEVTHGMELPTSSETSLLARTDLRTIDANGRTTLICAGDQIEEVMALTGMLRTCGSEVIIGFRSEAALAQFEQAIGESRRLAGESFIPPIALPIDLRNPSTIDALFDWAGENTGGIHAAVILPASGREPATQVIDIDDAHVQAFLNDEIVGSIIIASRLARYWQAQRIAPGARAREPRVIFLSNGASTAGNPYGRIQSAAIEQLIRVWRHEAALDYERATAAGERVLPAVWASQIVRFANRSLEGLEFACAWTAQLLHSQRRINEITLTIPADISATTGARSASVGWAESLIGLHLGKVALITGGSAGIGGQIGRLLALSGARVMLAARDPHKLEQIQATIRAELAEVGYTDVEERVQIAPGCDVSSEEQLVDLVERTLAAFGTVDYLINNAGIAGVEEMVIDMPVEGWRNTLYANLISNYSLMRKLAPLMKKQGSGYVLNVSSYFGGEKDAAIPYPNRADYAVSKAGQRAMAEVFARFLGPEIQINAIAPGPVEGDRLRGTGERPGLFARRARLILENKRLNELHAALITAARTDNRPMRELVELLLPNDVAALAQHPAAPDVLRTLAKRFQSEGDPAASSSSFLLNRSIAAKLLARLINGGYDLPADIFANLAVPPDPFFTRAQIDREARKVRDGIMGMLYLQRMPTEFDVAMATVYYLADRNVSGETFHPSGGLRYERTPTGGELFGLPAPERLAELVGSTVYLIGEHLTEHLNLLARAYLERYGARQVVMIVETEAGAEKMRHLLHDHVEAGRLPIIVAGDQIEAAIDQAIANYGRPGPVVCTPFRPLPSAPLVGRKDSDWSTVLSEAEFAELCEHQLTHHFRVARKIALSDGASLALVTPETTATSSTEQFALANFVKTTLHAFTATIGVESERTAQRILINQVDLTRRARAEEPRDPRERQQELERFIEAVLLVTAPLPPEADTRYAGRIHRGRAITV

SEQ ID NO: 786 - protein, 1229 aa, Roseiflexus castenholzii
MSTVRRLEGKVALITGGAGNIGEVITRRFLAEGATVVITGRNAEKLAVYRRRLIDEERVAPERVVALRMDGSDIAQVRAGVAQIVHGGTDVPIPLHRIDILVNNAGSAGPRRRLVDIPLEPSEVQPPDSETLAQAVGNLVGITWNLTRAAAPHMPSGSSVINISTIFSRTDYYGRIAYVAPKAALNALSDGLARELGVRGIRVNTIYPGPIESERIYTMFQAMDALKGQPEGDTASGFLRMMRLSRIDQNGEVVKRFPSPVDVANTAVFLASDESAAFTGHAFEVTHGMEVPTESRTTFVSRPGLRSVDATGKVILICAGDQVDDAVALADTLRSCRATVVIGFRDPRALEKASVLLREPRHALAADMYGRPTMTAEARLVRLDPLDPRAAAQTLEQIHAELGAIHHAVVLPGQSRHAPSASLIEVDDQVVERFLHQELVGTIALARELARFWEEYPSGSSMHRVLFVSNPDDQQGNQYSHILRAAVEQLVRVWRHESEYDSVNPAHQQEGQSSAAVWANQLIRYVNNEMANLDFTCAWVAKLLGSDRRIAEINLYLPEEIVGTIGVHNPGFGWAESLFGLHMGKVALITGGSAGIGGQIGRLLALSGAHVMLAARNADQLEQMRASIVREVRDASYPDAESRVAIFPGSDVSDIDGLERLVNHTVRVFGKVDYLINNAGIAGAEEMVIDMPVDAWRHTLRANLISNYALLRRLAPQMKAAGGAYVLNVSSYFGGEKYVAIPYPNRSDYAVSKAGQRAMVESLARFLGPEIQINAIAPGPVEGERLKGAGSRPGLFMRRARLILENKRLNEVFAALLAARHEGATIADLLPDLFANDIQSIANSAAMPAPLRRLATMLRETSDAGGSAQSYLMNATIARKLLNRLENGGYITLHDRRALTVEPPEPFFTEAQIEREAIKVRDGILGMLHLQRMPTEFDVALATVFYLADRNVTGETFHPSGGLRFERTVTEGELFGKPGQQRLERLKGSVVYLIGEHLRQHLVLLARTFLDEIHVARVVLLTETTQAATDLAAELSDYEAAGRFVVIPTCGDIEGGIDRAMAEYGRPGPVISTPFRPLPDRALSARNGDWSSVLTTAEFEELVEQQITHHFRVARKAGLIEGANVTLVTPPTSARSTSEEFALANFVKTTLHALTATAGAESERTVPHVPVNQVDLTRRARSEEPRTPSEEEEELQRFVNAVLLTSAPLPTPLESRYRARIYRGNAITV

SEQ ID NO: 787 - protein, 1232 aa, Roseiflexus sp.
MSTTRRHDRLEGKVALITGGAGNIGEVITRRFLAEGATVVITGRNVEKLAAYRRRLIDEERIAPDRVVALRMDGSDMAQVRAAIAQIVHGGADVPTPLKRIDILVNNAGSAGPRRRLVDIPLEPSEVHPPDTETLAQAVGNLVGVAWNLTRAAAPYMPPGSSIINVSTIFSRTDYYGRIAYVVPKAALNALSQGLARELGVRGIRVNTIYPGPIESERIHTVFQAMDALKGQPEGETARSFLRLMRLSRADTQGEVTKRFPLPVDVANTAVFLASEESAAFTGHAFEVTHGMEAPVESRTTFVSRPGLRSVDATGNVILICAGDQVDDAIALSDTLRSCRATVVVGFRDVQALEKASALLREPRHVAPADMYGRPTMVAETRLVHLDPLDSRAAAQTLERIRAELGTLHHAVILPASLRHAPTESLIDVDDRIIDRFLEQELVGAIALARELARFWEEHPAGSRAHRVLFVSNPDDQQGNRYADILRAAVEQLARVWRHESEYDAANPAHRHEDQPGAAVWANQLIRYVNSESANLDFTCAWVAKLLGSDRRIAEINLYLPEQIVSTIGVHNPGFGWAESLFGLHMGKVALITGGSAGIGAQIGRLLALSGAHVMLAARNAEQLEQMRALIVREVRDASYPDAESRVAIFPNSDVSDIDGLERLVNHTLRVFGKVDYLINNAGIAGAEEMVIDMPVDAWRHTLRANLISNYALLRRLAPQMKAAGGAYVLNVSSYFGGEKYVAIPYPNRADYAVSKAGQRAMVESLARFLGPEIQINAIAPGPVEGERLKGAANRPGLFMRRARLILENKRLNEVFAALLAARHEGAVIAALLPDLFVNDLQTIADNPAMPAPVRRLATMLRETTDAGGSAQSYLMNATIARKLLNRLENGGYITAGDRRALTNEPPDPFFTEAQIEREAIKVRDGILGMLHLQRMPTEFDVALATVFYLADRNVTGETFHPSGGLRFERTVTEGELFGKPGRQRLERMAGSVVYLIGEHLRQHLLLLARTFLDEIHVARVVLLTETEQAAAELATVFADEEAAGRFVIIPTGGDIEGGIDRAMAEYGRPGPVISTPFRPLPSRALSAQNGDWSNVLTTPEFEELVEQHITHHFRVVRKAGLIEGANVTLVTPPTSARSTAEEFALANFIKTTLHALTATAGAESERTMPHVPVNQVDLTRRARSEEPRTPAEEEEELQRFVNAVLLTSAPLPTPLESRYRARIYRGNAITV

SEQ ID NO: 788 - protein, 1217 aa, Erythrobacter sp.
MSKEGNAAKGRLEGKVALITGAAGNLGNEISRAFAREGAFVVMTGRTEERISAAREQLIADTGVAPERIDTAVLDGGNPDSIRAAMAKLRKEYGRIDILINNAGSAGPKQPLHNVPLSPQEMEACGDTETVRDAMLNILGVTWNMARIVAPMMPVGGAMVNISTIFSHTRYYGRTAYVVPKAALNALSNQLASELGPRGIRVNTVFPGPIESDRIRTVFAAMDEVQSQPKDTTANYFTGRMALTRSVNGKVDGKPLPNPKDIAGTCLFLASEEAAGIAGEEVDVTHGLSANRTSASTYMTRPSMRSLDGAGLNIFIVSGENWDDALVAAHTLIGSGAKVRLGLARNADVAQANARLKAQGIGEELTVTRFNRAEPDAMEDALAAFSGDVDGAITGAIILPVKPSGHFTGSLLAADDDTVTKFMDTELVGAIAVSRSLARYWHGREDLQSPPRCVFMTNPGDPLGNSFASVLSAGITQLIRIWRDEERVQAGNGSTEHAVWSNQIVRHTNTEDENTRFASGHATRVLFREQHIAEIDLKLPANISEETGSRKAMVGFAENITGLHLGKVAFITGGSAGIGGQVARLLALAGAKVMMVARRESELVAARDRIVGELQDIGFAGVERRVKYMADIDVSDFASLDKAVDATLEEFGRIDYLINNAGVAGAEDMVIDMEPEAWRFTLDANLISNYHLMQRVVPLMKEQGSGYVLNVSSYFGGEKFLAVAYPNRADYGLSKAGQRAMVEAFSPFLGPEVQCNAIAPGPVDGDRLSGTGGKPGLFQRRAKLILENKRLNAVYSAVIHAIREGGDAAKILTRLSRNSTSTLSHDAEAPEELRKLALDFASQGDGLCTWDQYLLTDAMAQRLLVRLQLGGFLLGSNEWASLSSSEQTWLKLSPPDDKPFLPAAQVDKVANGVGKGVISQLHLGAMPTEAEVAQATVFFLADRAVSGETFMPSGGLRVERSNTEREMFGSPKQERIDKMKGKTVWIIGEHLSDYVAATIEELVSGCGVAKVVLIAKDKSGEKAVRDQLPNDLSKDALEVLIAGDGLEEAMDEALGHWGKPTTVLSMPGEPLPDHLFEGGNPLSTKDFAHMVEANITRHYRVTRKASLYDGCQVVLVSPDVPYGSDGPGVALANFVKTSLHAFTATVAVENERLVHDVPVNQINLTRRVSSEEPRDADEHAEELRRFTRAVLLVGAPLPDAQDSRYRSKIYRGTSMTV

SEQ ID NO: 789 - protein, 1210 aa, Unknown
  Description of Unknown: Gamma proteobacterium NOR51-B polypeptide
MNTETRTTSGGRLHDKVVILTGAAGNIGSYISRSLLREGANLVMTGRNEPKLQAFVEGLVEEGFDRDNILIAIGDSAKADICREIVKATVNHFGNIDVLVNNAGGAGPRRTLRDIPFSESERLARGDDETMLDAAMNLLAGAWNMTRAAVPHMSEGGSIVNVSTIFSRTHYYGRIPYVVPKSGLNALSIGLAKELGEEHGIRVNTLFPGPIESERIDTVFGNMDALQSAPAGATSQEFRDLMITRRENPDGEYEYRYPTPNDVASTVTWLASEESAALSGHHIEVTNGMQVPAQSRSKLVSWPDKRLEDLSGQVVFLLAGSDYEDALAFAERHMVSGAKVVLAFRSLESLGLARSLCASRDLESIHLLHLEPLRRESADRCFDYIRDHFGRLDGIVVLPRSGNGEHGYSLSTAGDDDVEAFVRDEIISPVAFAAALAINLDRWGILEEAPALTYVTNPTDGHGDYLNEVKRAAIEALIRIWRHEDRQMRKKGEREWAMLPNQLVRYDNNEEDNLTFTADWAATLTNRVRRMDPINLWVPESIMRATGKSGMPQSIQRVLPGLHKGRTAVITGGSLGIGLQLGRFLAIAGARVLLSARSKEKLEEARHEIVEELRGVGYPNAHQRVHILPDIDVGDEEALERLYNHSIELFGNVDFLINNAGISGAEEMVVDMSLEAWNRTMYANLISNYSLIRKYAPKMKANGYGVVLNVSSYFGGEKYVAVAYPNRADYAVSKAGQRVLAEILSRHLGPEIRINALAPGPVDGARLRGLGGAPGLFERRGRLVLENKRLNSVHKAVLAALREGATPEVIMALSRNALGDAKPTAGQSKALDKLFAQVEDSPEGGNSTAFLLNRDLAEKLMNRLVTGGLFTPESATQFMEGFVDAPAIFFDEKSVNKAAAGIEAGILNRLHLHKMPTDEQIGLSTVFHLADDIASGETFHPSGGLKFDRSVTEGELLLPPDRDSLAKLKGKRVVLIGDSMREELSAIGNGFINQGVASLTVLTRSPEACEEVQHSLQKSNSVTLDVRCIEDNIEDALDDLLQNQGGFDVVVSAPFSRLPYNPLAAEREGSWNRVLSHTDFARLIDEQLTHHFRVARRAALVPNCQIVLLTPDTSFVSSREEFALALFVKNSLHAFTVTLGVETERLPTVPAVNQVQLTRRARAEEPATESELQEEMERLVSAVLQCAVPAPSPSESRYLARIFRGNAVTV

SEQ ID NO: 790 - protein, 1214 aa, Unknown
  Description of Unknown: Gamma proteobacterium NOR5-3 polypeptide
MNNQNTTQTHSTSGARLDNKVVILTGAAGNIGAFVSRNLLREGAKLVMTGRNEPKLKSFVEELVGEGFDREKILIAIGDSAKADVCRRIVASAVEQFGKIDVLVNNAGGAGPRRTLREIPFSESERLARGDDETMFDAAMNLLAGPWNMTRAAVPHMVRGGSIVNVSTIFSRTHYYGRIPYVVPKSGLNALSIGLAKELGEEHGIRVNTLFPGPIESERIDTVFGNMDALQSAPAGTTSQEFRDLMITRRENPEGEFEYRYPTPNDVASTVTWLACGESAALSGHHIEVTNGMQVPAQSRSKLVSWPDKRLEDLSGQVVFVLAGSDYEDALAFSERHIVSGAKVVLAFRSLESLGYARSLIASRGLDSIHLLHLEPLRRESADRCFDYIRDHFGRLDGIVVLPRSGNGQHGYSLSTAGDDDVEAFVRDEIVSPVAFAAQLAINLDRWGMLDEAPALTYVTNPTDGHGDYLNEVKRAAIEALIRIWRHEDRQMRKKGERQWAMLPNQLVRYDNDEEDNLTFTADWAATLTNRVRRMDPINLWVPESIKRATGKGSMPQSIQRVLPGLHKGRTAVITGGSLGIGLQLGRFLAIAGARVLLSARSKEKLEEARNGIVEELRAVGYPNAHQRVHILPDIDVGDEEALVRLYDHSIELFGHVDFLINNAGISGAEEMVVDMTLEAWNRTMYANLISNYSLIRKYAPKMKANGYGIVLNVSSYFGGEKYVAVAYPNRADYAVSKAGQRVLAEILSRHLGPEIRINALAPGPVDGARLRGLGGAPGLFERRGRLVLENKRLNFVHKAILAAIDEKVSDESILALAKNALSEMKRVAGQSKALGKLCAQVEDSREGGNSAAYLLNKDLADKLLKRLVTGGLFKPESAEAFMEAFVDAPTPFFDEKAVKKAADGIEAGILNRLHLHKMPTDEQIGLSTVFHLADDIASGETFHPSGGLKFDRSVTEGELLLPPDRESLARLGGKRVVLIGDAMREEMSAIGNGFIEREVASLTVLTRTAEAQEEILHSLPGTGKTKVDVRVIGDNLEDALDDLVQNQGGFDVVVSAPFSRLPYNPLAAEREGSWERVLSHTDFAKLVDEQLTQHFRVARRAALVPNCQIVLLTPDTSFVSSREEFALALFVKNSLHAFTVTLGVETERLPTVPAVNQVQLTRRARTEEPASESELEEELERLVYAVLQCAVPAPSPTESRYLARIFRGNAVTV

SEQ ID NO: 791 - protein, 1216 aa, Unknown
  Description of Unknown: Marine gamma proteobacterium HTCC2080 polypeptide
MNDFVQFTDDMTSQSKSGKRLDNKSIILTGAAGSIGRFITRQLLCEGARVMMTGRDISKLEEFVDSLCDDGFDRENMVVTVGDCADPEVCRRIVADTVEAFGTIDVLVNNAGAAGPKYTLRDIPFSDVEMKTAGSDQTMFDSAMNLLGAPWNMARAAAPHMSVGASIINVSTIFSRTHYFGRIPYVVPKSGLNALSKGLALELGEEQGIRVNTVFPGPIESERIDTVFARMDELQNLEPGSTGREFRDLMITTREGEEGLEYRYPTPTDVASSITWLASGESAAVSGHAVEVTNGMQVPAQSRSQLVSWPDKRLEDLSDHIVLILGGSDYEEAVTFAERHTESGARVLLAFRNLESVGHARSIIQARELESVQLSHLDPLRRESVDRTMQFIDDHFGRLDGVIVLPQKKNGQYGYSICSATDDDVENFVKDEVVAPVAFASTLATNLSRWFGKCDPPAITYVTNASDGHGNLLNEVIRASNEALIRGWRHEDETLKAAGELSWSVQPNQLVRYDTEDRDALPFAADWAATLTNRVRQMDPINLWIPKDIKRATGKGAMPTSLMRVLPGLHKGKTAVITGGSLGIGLQLGRYLAIAGARVLLSARSEAKLIEAKAEIVAELSGIGYPNADNRIHVLANIDVGDPAALETLHQHAVDLFGQVDFLINNAGISGAEEMVVDMTLKDWDRTMEANLISNYSLIRKFGPLMKDKGRGSILNVSSYFGGEKYVAVAYPNRADYAVSKAGQRVLAEILSRHLGPEIQINALAPGPVDGARLRGLGDAPGLFDRRGRLVLENKRLNQVHAAIISAVADGYPIEEIRKLSANAVEVLPTHNLPSVLSRLYSQVKDSGGTGSSSKCLLHMGMAVKLVERLVNAGIFTTEDKDEFLGSFVDAPSPFFDKEACKRSATQIESGILNRLHLHKMPTDEQVGLSTVFHLADEIVSGETFHPSGGLKFDRSVTEGELLLSPSEKDLARLSGKRVVILGDCMRNEITEIAKGFKSNGVEKLWILTRSEETKTTLYHALECDSVENIDVRCIGDDIEGALDNLLRHDGGFDVVVSSPFERLPLNALAGDRGGDWDRVLSDEQFRQLVHQQLTHHFRSARIAALIPSCQIVLLTPETSLASTREEFALALFVKNSLHAFTVTLGVEGERLPTVPAVNQVQLTRRAHTEEPSNDQELSEEMERLVAAVMQCSVPAPSPKESRYLSKIFRGNAVTV

SEQ ID NO: 792 - protein, 219 aa, Psuedomonas fluorescens
  Carbonic anhydrase P. fluorescens Pf-5
MQNIIDGFLKFQREAFPQRSELFKQLASTQNPGTLFVTCSDSRVVPELLTQQEPGDLFVIRNAGNIVPSYGPEPGGVSATVEYAVAVLGVSDIVICGHSDCGAMTAISTCKCLDHLPAVANWLRHAESAKVINAARQHASPAEHLDALVRDNVIAQLANLKTHPSVALALEQGRLNLHGWVYDIESGAIVALDGNTQRFVSLAEYPHTCALASQASSAA

SEQ ID NO: 793 - protein, 213 aa, Yersinia ruckeri
  Carbonic anhydrase Y. ruckeri ATCC 29473
MQDIIDGFLKFQREVFPQRSELFKRLADTQHPGALFVTCSDSRVVPELLTQREPGELFVIRNAGNIVPSYGPEPGGVSATVEYAVAVLGVTDVVICGHSNCGAMSAIAECQCLDHLPAVAAWLRHADSAKLVNAALPHASPKDRLNSLVRENVIAQLANIKTHPSVALACAQGRLRLHGWVYDIETGSIDVLDELTRTFSPLSAYSVVSKPTE

SEQ ID NO: 794 - protein, 219 aa, Hahella chejuensis
  Carbonic anhydrase Hahella chejuensis KCTC 2396
MKDIIEGFLKFQREAFPERKELFKDLANQQQPRTLFISCSDSRLVPELVTQREPGDLFVIRNAGNIVPPYGPEPGGVSASVEYAVAALRVADIVVCGHSNCGAMTAVATCQCIDHMPAVAHWLRYADSAKVVNQARKHASERAKIEDMVRENVIAQLANLQTHPSVRLALQEGRLTMHGWFYDIESGGIDAYDGSRHAFVPLAEHPEARAIPGKLSHAV

SEQ ID NO: 795 - protein, 219 aa, Burkholderia cenocepacia
  Carbonic anhydrase Burkholderia cenocepacia J23152
MKDIIEGFLKFQRDAYPARAALFRDLARSQNPRALFISCSDSRLVPELVTQREPGDLFVIRNAGNIVPSYGPEPGGVSASVEYAVAALRVTDVVICGHSDCGAMTAIATCQCMDHMPAVGHWLRYADSARVVNEARTHRSERERIDSMVRENVVAQLANLKTHPAVRLALEEGRLALHGWVYDIESGCIDAYDGATGRFVSLADHPGVRATPATLPVAA

SEQ ID NO: 796 - protein, 215 aa, Yersinia frederiksenii
  Carbonic anhydrase Yersinia frederiksenii ATCC 33461
MKEIIDGFLKFQRDAFPERAELFRSLATQQSPKTLFISCSDSRMVPELVTQREPGDLFVIRNAGNIVPSYGPEPGGISASVEYAVTALKVTDIVICGHSDCGAMTAIAKCHCLDHMPAVKHWLQYADSAKVVNESREYKNIHDKTISMVHENVVAQLANIQTHPSVRLALEEGRLTIHGWVYDIESGLISAFDRASRQFVSLAANPNVRAVPAHN

SEQ ID NO: 797 - protein, 219 aa, Pseudomonas entomophila
  Carbonic anhydrase Pseudomonas entomophila L48
MQDIIDGFLKFQRDAFPERVKLFKDLATQQSPRALFISCSDSRLVPELVTQREPGDLFVIRNAGNIVPSYGPEPGGVSASVEYAVAALQVADIVICGHSDCGAMTAIATCKCLDHMPAVAGWLRYADSARVVNEARQHQSPHAKVEAMVRENVIAQLANIQTHPSVRLALEEGRVALHGWIYDIESGRIDAFDGRTGQFVSLADNPEVRAVSHASRHVA

SEQ ID NO: 798 - protein, 219 aa, Pseudomonas putida
  Carbonate dehydratase Pseudomonas putida W619
MKAIIDGFLKFQKNAFPERVKLFKDLANQQAPKALFISCSDSRLVPELVTQREPGDLFVIRNAGNIVPSYGPEPGGVSASVEYAVAGLNVADIVICGHSDCGAMTAIATCKCLDHMPAVAGWLRYADSAKVVNEARHHVDKPSKVASMVRENVIAQLANIQTHPSVRLALEEGRVTLHGWIYDIETGGIDAFDGSTGTFVSLAENPEVHAVSQQARHVA

SEQ ID NO: 799 - protein, 217 aa, Serratia proteamaculans
  Carbonate dehydratase Serratia proteamaculans 568
MKEVIEGFLKFQREAFVERTALFQRLATQQSPRTLFISCSDSRLVPELITQREPGDLFVIRNAGNIVPSFGPEPGGVSASVEYAVSALGVEDIVICGHSDCGAMTAIATCQCLQHMPTVANWLRYADSAKVVNQAYQHASENEKVSSMVRENVIAQLNNIKTHPSVALALEQGRLKLHGWVYDIASGGIEALDGETRRFIPLATNPEVTATPAVSRF

SEQ ID NO: 800 - protein, 211 aa, Erwinia tasmaniensis
  Carbonate dehydratase Erwinia tasmaniensis Et1/99
MQHIVEGFLNFQKDIFPEQKELFRSLASSQNPKALFISCSDSRLVPELVTQQDPGQLFVIRNAGNIVPSFGPEPGGVSATIEYAVVALGVSDIVICGHSNCGAMKAIATCQCLAPMPAVEHWLRYADAAKAVVEKKNYDTEEDKVNAMVQENVIAQLNNIKTHPSVAVGLRNNALRLHGWVYDIESGAIRALDKDSKKFVLLSDNPQVHFE

SEQ ID NO: 801 - protein, 220 aa, Pseudomonas aeruginosa
  Carbonate dehydratase Pseudomonas aeruginosa PA7
MRDIIDGFLRFQRDAYPARSQLFKSLATRQAPKALFIACSDSRVVPELLTQREPGELFVIRNAGNIVPGYGPQPGGVSASVEYAVAVLGVADIVVCGHSDCGAMGAIASCACLDHLPAVAGWLRHAEAARAMNSAHEHSSDAARLDALVRHNVIAQLANLRTHPSVARALEQGRLNLHGWVYDIESGRIDALDGASRRFVSLAEHPGVRAVGGEPGQAVA

SEQ ID NO: 802 - protein, 202 aa, Streptosporangium roseum
  Carbonate dehydratase Streptosporangium roseum DSM 43021
MQDLEEGVARFQRDVFPAKTELFTRLATAHQPATLFISCSDARVVPELITQSEPGELFVIRTAGNLVPAYAPGSADGVAAGIEYAVAVLGVSDIVVCGHSGCGAMTAVADGLDPAALPAVAGWLRHADASRARVTTTETGTGEVAALVRQNVLTQLANLATHPSVAHALAGKTVTLHGWIYDIGTGTVAELDATGRPSALAV

SEQ ID NO: 803 - DNA, 3704 bp, Artificial Sequence
  Description of Artificial Sequence: Synthetic mcr codon optimized from C. aurantiacus
gaattccgctagcaggagctaaggaagctaaaatgtccggtacgggtcgtttggctggtaaaattgcattgatcaccggtggtgctggtaacattggttccgagctgacccgccgttttctggccgagggtgcgacggttattatcagcggccgtaaccgtgcgaagctgaccgcgctggccgagcgcatgcaagccgaggccggcgtgccggccaagcgcattgatttggaggtgatggatggttccgaccctgtggctgtccgtgccggtatcgaggcaatcgtcgctcgccacggtcagattgacattctggttaacaacgcgggctccgccggtgcccaacgtcgcttggcggaaattccgctgacggaggcagaattgggtccgggtgcggaggagactttgcacgcttcgatcgcgaatctgttgggcatgggttggcacctgatgcgtattgcggctccgcacatgccagttggctccgcagttatcaacgtttcgactattttctcgcgcgcagagtactatggtcgcattccgtacgttaccccgaaggcagcgctgaacgctttgtcccagctggctgcccgcgagctgggcgctcgtggcatccgcgttaacactattttcccaggtcctattgagtccgaccgcatccgtaccgtgtttcaacgtatggatcaactgaagggtcgcccggagggcgacaccgcccatcactttttgaacaccatgcgcctgtgccgcgcaaacgaccaaggcgctttggaacgccgctttccgtccgttggcgatgttgctgatgcggctgtgtttctggcttctgctgagagcgcggcactgtcgggtgagacgattgaggtcacccacggtatggaactgccggcgtgtagcgaaacctccttgttggcgcgtaccgatctgcgtaccatcgacgcgagcggtcgcactaccctgatttgcgctggcgatcaaattgaagaagttatggccctgacgggcatgctgcgtacgtgcggtagcgaagtgattatcggcttccgttctgcggctgccctggcgcaatttgagcaggcagtgaatgaatctcgccgtctggcaggtgcggatttcaccccgccgatcgctttgccgttggacccacgtgacccggccaccattgatgcggttttcgattggggcgcaggcgagaatacgggtggcatccatgcggcggtcattctgccggcaacctcccacgaaccggctccgtgcgtgattgaagtcgatgacgaacgcgtcctgaatttcctggccgatgaaattaccggcaccatcgttattgcgagccgtttggcgcgctattggcaatcccaacgcctgaccccgggtgcccgtgcccgcggtccgcgtgttatctttctgagcaacggtgccgatcaaaatggtaatgtttacggtcgtattcaatctgcggcgatcggtcaattgattcgcgtttggcgtcacgaggcggagttggactatcaacgtgcatccgccgcaggcgatcacgttctgccgccggtttgggcgaaccagattgtccgtttcgctaaccgctccctggaaggtctggagttcgcgtgcgcgtggaccgcacagctgctgcacagccaacgtcatattaacgaaattacgctgaacattccagccaatattagcgcgaccacgggcgcacgttccgccagcgtcggctgggccgagtccttgattggtctgcacctgggcaaggtggctctgattaccggtggttcggcgggcatcggtggtcaaatcggtcgtctgctggccttgtctggcgcgcgtgtgatgctggccgctcgcgatcgccataaattggaacagatgcaagccatgattcaaagcgaattggcggaggttggttataccgatgtggaggaccgtgtgcacatcgctccgggttgcgatgtgagcagcgaggcgcagctggcagatctggtggaacgtacgctgtccgcattcggtaccgtggattatttgattaataacgccggtattgcgggcgtggaggagatggtgatcgacatgccggtggaaggctggcgtcacaccctgtttgccaacctgatttcgaattattcgctgatgcgcaagttggcgccgctgatgaagaagcaaggtagcggttacatcctgaacgtttcttcctattttggcggtgagaaggacgcggcgattccttatccgaaccgcgccgactacgccgtctccaaggctggccaacgcgcgatggcggaagtgttcgctcgtttcctgggtccagagattcagatcaatgctattgccccaggtccggttgaaggcgaccgcctgcgtggtaccggtgagcgtccgggcctgtttgctcgtcgcgcccgtctgatcttggagaataaacgcctgaacgaattgcacgcggctttgattgctgcggcccgcaccgatgagcgctcgatgcacgagttggttgaattgttgctgccgaacgacgtggccgcgttggagcagaacccagcggcccctaccgcgctgcgtgagctggcacgccgcttccgtagcgaaggtgatccggcggcaagctcctcgtccgccttgctgaatcgctccatcgctgccaagctgttggctcgcttgcataacggtggctatgtgctgccggcggatatttttgcaaatctgcctaatccgccggacccgttctttacccgtgcgcaaattgaccgcgaagctcgcaaggtgcgtgatggtattatgggtatgctgtatctgcagcgtatgccaaccgagtttgacgtcgctatggcaaccgtgtactatctggccgatcgtaacgtgagcggcgaaactttccatccgtctggtggtttgcgctacgagcgtaccccgaccggtggcgagctgttcggcctgccatcgccggaacgtctggcggagctggttggtagcacggtgtacctgatcggtgaacacctgaccgagcacctgaacctgctggctcgtgcctatttggagcgctacggtgcccgtcaagtggtgatgattgttgagacggaaaccggtgcggaaaccatgcgtcgtctgttgcatgatcacgtcgaggcaggtcgcctgatgactattgtggcaggtgatcagattgaggcagcgattgaccaagcgatcacgcgctatggccgtccgggtccggtggtgtgcactccattccgtccactgccaaccgttccgctggtcggtcgtaaagactccgattggagcaccgttttgagcgaggcggaatttgcggaactgtgtgagcatcagctgacccaccatttccgtgttgctcgtaagatcgccttgtcggatggcgcgtcgctggcgttggttaccccggaaacgactgcgactagcaccacggagcaatttgctctggcgaacttcatcaagaccaccctgcacgcgttcaccgcgaccatcggtgttgagtcggagcgcaccgcgcaacgtattctgattaaccaggttgatctgacgcgccgcgcccgtgcggaagagccgcgtgacccgcacgagcgtcagcaggaattggaacgcttcattgaagccgttctgctggttaccgctccgctgcctcctgaggcagacacgcgctacgcaggccgtattcaccgcggtcgtgcgattaccgtctaatagaagctt

SEQ ID NO: 804 - DNA, 4911 bp, Artificial Sequence
  Description of Artificial Sequence: Synthetic pJ206 plasmid polynucleotide
ggtggcggtacttgggtcgatatcaaagtgcatcacttcttcccgtatgcccaactttgtatagagagccactgcgggatcgtcaccgtaatctgcttgcacgtagatcacataagcaccaagcgcgttggcctcatgcttgaggagattgatgagcgcggtggcaatgccctgcctccggtgctcgccggagactgcgagatcatagatatagatctcactacgcggctgctcaaacttgggcagaacgtaagccgcgagagcgccaacaaccgcttcttggtcgaaggcagcaagcgcgatgaatgtcttactacggagcaagttcccgaggtaatcggagtccggctgatgttgggagtaggtggctacgtcaccgaactcacgaccgaaaagatcaagagcagcccgcatggatttgacttggtcagggccgagcctacatgtgcgaatgatgcccatacttgagccacctaactttgttttagggcgactgccctgctgcgtaacatcgttgctgctccataacatcaaacatcgacccacggcgtaacgcgcttgctgcttggatgcccgaggcatagactgtacaaaaaaacagtcataacaagccatgaaaaccgccactgcgccgttaccaccgctgcgttcggtcaaggttctggaccagttgcgtgagcgcatttttttttcctcctcggcgtttacgccccgccctgccactcatcgcagtactgttgtaattcattaagcattctgccgacatggaagccatcacagacggcatgatgaacctgaatcgccagcggcatcagcaccttgtcgccttgcgtataatatttgcccatagtgaaaacgggggcgaagaagttgtccatattggccacgtttaaatcaaaactggtgaaactcacccagggattggcgctgacgaaaaacatattctcaataaaccctttagggaaataggccaggttttcaccgtaacacgccacatcttgcgaatatatgtgtagaaactgccggaaatcgtcgtggtattcactccagagcgatgaaaacgtttcagtttgctcatggaaaacggtgtaacaagggtgaacactatcccatatcaccagctcaccgtctttcattgccatacggaactccggatgagcattcatcaggcgggcaagaatgtgaataaaggccggataaaacttgtgcttatttttctttacggtctttaaaaaggccgtaatatccagctgaacggtctggttataggtacattgagcaactgactgaaatgcctcaaaatgttctttacgatgccattgggatatatcaacggtggtatatccagtgatttttttctccatttttttttcctcctttagaaaaactcatcgagcatcaaatgaaactgcaatttattcatatcaggattatcaataccatatttttgaaaaagccgtttctgtaatgaaggagaaaactcaccgaggcagttccataggatggcaagatcctggtatcggtctgcgattccgactcgtccaacatcaatacaacctattaatttcccctcgtcaaaaataaggttatcaagtgagaaatcaccatgagtgacgactgaatccggtgagaatggcaaaagtttatgcatttctttccagacttgttcaacaggccagccattacgctcgtcatcaaaatcactcgcatcaaccaaaccgttattcattcgtgattgcgcctgagcgaggcgaaatacgcgatcgctgttaaaaggacaattacaaacaggaatcgagtgcaaccggcgcaggaacactgccagcgcatcaacaatattttcacctgaatcaggatattcttctaatacctggaacgctgtttttccggggatcgcagtggtgagtaaccatgcatcatcaggagtacggataaaatgcttgatggtcggaagtggcataaattccgtcagccagtttagtctgaccatctcatctgtaacatcattggcaacgctacctttgccatgtttcagaaacaactctggcgcatcgggcttcccatacaagcgatagattgtcgcacctgattgcccgacattatcgcgagcccatttatacccatataaatcagcatccatgttggaatttaatcgcggcctcgacgtttcccgttgaatatggctcatttttttttcctcctttaccaatgcttaatcagtgaggcacctatctcagcgatctgtctatttcgttcatccatagttgcctgactccccgtcgtgtagataactacgatacgggagggcttaccatctggccccagcgctgcgatgataccgcgagaaccacgctcaccggctccggatttatcagcaataaaccagccagccggaagggccgagcgcagaagtggtcctgcaactttatccgcctccatccagtctattaattgttgccgggaagctagagtaagtagttcgccagttaatagtttgcgcaacgttgttgccatcgctacaggcatcgtggtgtcacgctcgtcgtttggtatggcttcattcagctccggttcccaacgatcaaggcgagttacatgatcccccatgttgtgcaaaaaagcggttagctccttcggtcctccgatcgttgtcagaagtaagttggccgcagtgttatcactcatggttatggcagcactgcataattctcttactgtcatgccatccgtaagatgcttttctgtgactggtgagtactcaaccaagtcattctgagaatagtgtatgcggcgaccgagttgctcttgcccggcgtcaatacgggataataccgcgccacatagcagaactttaaaagtgctcatcattggaaaacgttcttcggggcgaaaactctcaaggatcttaccgctgttgagatccagttcgatgtaacccactcgtgcacccaactgatcttcagcatcttttactttcaccagcgtttctgggtgagcaaaaacaggaaggcaaaatgccgcaaaaaagggaataagggcgacacggaaatgttgaatactcatattcttcctttttcaatattattgaagcatttatcagggttattgtctcatgagcggatacatatttgaatgtatttagaaaaataaacaaataggggtcagtgttacaaccaattaaccaattctgaacattatcgcgagcccatttatacctgaatatggctcataacaccccttgtttgcctggcggcagtagcgcggtggtcccacctgaccccatgccgaactcagaagtgaaacgccgtagcgccgatggtagtgtggggactccccatgcgagagtagggaactgccaggcatcaaataaaacgaaaggctcagtcgaaagactgggcctttcgcccgggctaattgaggggtgtcgcccttgtcgctgagatatcgatatccgtcaaaagggcgacacaaaatttattctaaatgcataataaatactgataacatcttatagtttgtattatattttgtattatcgttgacatgtataattttgatatcaaaaactgattttccctttattattttcgagatttattttcttaattctctttaacaaactagaaatattgtatatacaaaaaatcataaataatagatgaatagtttaattataggtgttcatcaatcgaaaaagcaacgtatcttatttaaagtgcgttgcttttttctcatttataaggttaaataattctcatatatcaagcaaagtgacaggcgcccttaaatattctgacaaatgctctttccctaaactccccccataaaaaaacccgccgaagcgggtttttacgttatttgcggattaacgattactcgttatcagaaccgcccagggggcccgagcttaagactggccgtcgttttacaacacagaaagagtttgtagaaacgcaaaaaggccatccgtcaggggccttctgcttagtttgatgcctggcagttccctactctcgccttccgcttcctcgctcactgactcgctgcgctcggtcgttcggctgcggcgagcggtatcagctcactcaaaggcggtaatacggttatccacagaatcaggggataacgcaggaaagaacatgtgagcaaaaggccagcaaaaggccaggaaccgtaaaaaggccgcgttgctggcgtttttccataggctccgcccccctgacgagcatcacaaaaatcgacgctcaagtcagaggtggcgaaacccgacaggactataaagataccaggcgtttccccctggaagctccctcgtgcgctctcctgttccgaccctgccgcttaccggatacctgtccgcctttctcccttcgggaagcgtggcgctttctcatagctcacgctgtaggtatctcagttcggtgtaggtcgttcgctccaagctgggctgtgtgcacgaaccccccgttcagcccgaccgctgcgccttatccggtaactatcgtcttgagtccaacccggtaagacacgacttatcgccactggcagcagccactggtaacaggattagcagagcgaggtatgtaggcggtgctacagagttcttgaagtggtgggctaactacggctacactagaagaacagtatttggtatctgcgctctgctgaagccagttaccttcggaaaaagagttggtagctcttgatccggcaaacaaaccaccgctggtagcggtggtttttttgtttgcaagcagcagattacgcgcagaaaaaaaggatctcaagaagatcctttgatcttttctacggggtctgacgctcagtggaacgacgcgcgcgtaactcacgttaagggattttggtcatgagcttgcgccgtcccgtcaagtcagcgtaatgctctgctta

SEQ ID NO: 805 - DNA, 298 bp, Artificial Sequence
  Description of Artificial Sequence: Synthetic P(talA) promoter based on E. coli
ggtcatccatttggttgttcctttcacgtaacgttcacaaataaagtgtgtgggcaacagcccctgcccacaacgtggcgcacattattaccctgccggagtctacagactttgagcaagtccaaactctcaccattaatataatgttttggtaataatcctataacactgatgttacctgcttaatccagcaataccatgcctgtctgctatgcttttttgatgcgtttagcgaaatttctcagaagtgtgaattaacgcactcatctaacactttacttttcaaggagtatttccc

SEQ ID NO: 806 - DNA, 5794 bp, Artificial Sequence
  Description of Artificial Sequence: Synthetic plasmid pSMART(HC)Amp-PtalA-mcr
ggtcatccatttggttgttcctttcacgtaacgttcacaaataaagtgtgtgggcaacagcccctgcccacaacgtggcgcacattattaccctgccggagtctacagactttgagcaagtccaaactctcaccattaatataatgttttggtaataatcctataacactgatgttacctgcttaatccagcaataccatgcctgtctgctatgcttttttgatgcgtttagcgaaatttctcagaagtgtgaattaacgcactcatctaacactttacttttcaaggagtatttcccatggccggtacgggtcgtttggctggtaaaattgcattgatcaccggtggtgctggtaacattggttccgagctgacccgccgttttctggccgagggtgcgacggttattatcagcggccgtaaccgtgcgaagctgaccgcgctggccgagcgcatgcaagccgaggccggcgtgccggccaagcgcattgatttggaggtgatggatggttccgaccctgtggctgtccgtgccggtatcgaggcaatcgtcgctcgccacggtcagattgacattctggttaacaacgcgggctccgccggtgcccaacgtcgcttggcggaaattccgctgacggaggcagaattgggtccgggtgcggaggagactttgcacgcttcgatcgcgaatctgttgggcatgggttggcacctgatgcgtattgcggctccgcacatgccagttggctccgcagttatcaacgtttcgactattttctcgcgcgcagagtactatggtcgcattccgtacgttaccccgaaggcagcgctgaacgctttgtcccagctggctgcccgcgagctgggcgctcgtggcatccgcgttaacactattttcccaggtcctattgagtccgaccgcatccgtaccgtgtttcaacgtatggatcaactgaagggtcgcccggagggcgacaccgcccatcactttttgaacaccatgcgcctgtgccgcgcaaacgaccaaggcgctttggaacgccgctttccgtccgttggcgatgttgctgatgcggctgtgtttctggcttctgctgagagcgcggcactgtcgggtgagacgattgaggtcacccacggtatggaactgccggcgtgtagcgaaacctccttgttggcgcgtaccgatctgcgtaccatcgacgcgagcggtcgcactaccctgatttgcgctggcgatcaaattgaagaagttatggccctgacgggcatgctgcgtacgtgcggtagcgaagtgattatcggcttccgttctgcggctgccctggcgcaatttgagcaggcagtgaatgaatctcgccgtctggcaggtgcggatttcaccccgccgatcgctttgccgttggacccacgtgacccggccaccattgatgcggttttcgattggggcgcaggcgagaatacgggtggcatccatgcggcggtcattctgccggcaacctcccacgaaccggctccgtgcgtgattgaagtcgatgacgaacgcgtcctgaatttcctggccgatgaaattaccggcaccatcgttattgcgagccgtttggcgcgctattggcaatcccaacgcctgaccccgggtgcccgtgcccgcggtccgcgtgttatctttctgagcaacggtgccgatcaaaatggtaatgtttacggtcgtattcaatctgcggcgatcggtcaattgattcgcgtttggcgtcacgaggcggagttggactatcaacgtgcatccgccgcaggcgatcacgttctgccgccggtttgggcgaaccagattgtccgtttcgctaaccgctccctggaaggtctggagttcgcgtgcgcgtggaccgcacagctgctgcacagccaacgtcatattaacgaaattacgctgaacattccagccaatattagcgcgaccacgggcgcacgttccgccagcgtcggctgggccgagtccttgattggtctgcacctgggcaaggtggctctgattaccggtggttcggcgggcatcggtggtcaaatcggtcgtctgctggccttgtctggcgcgcgtgtgatgctggccgctcgcgatcgccataaattggaacagatgcaagccatgattcaaagcgaattggcggaggttggttataccgatgtggaggaccgtgtgcacatcgctccgggttgcgatgtgagcagcgaggcgcagctggcagatctggtggaacgtacgctgtccgcattcggtaccgtggattatttgattaataacgccggtattgcgggcgtggaggagatggtgatcgacatgccggtggaaggctggcgtcacaccctgtttgccaacctgatttcgaattattcgctgatgcgcaagttggcgccgctgatgaagaagcaaggtagcggttacatcctgaacgtttcttcctattttggcggtgagaaggacgcggcgattccttatccgaaccgcgccgactacgccgtctccaaggctggccaacgcgcgatggcggaagtgttcgctcgtttcctgggtccagagattcagatcaatgctattgccccaggtccggttgaaggcgaccgcctgcgtggtaccggtgagcgtccgggcctgtttgctcgtcgcgcccgtctgatcttggagaataaacgcctgaacgaattgcacgcggctttgattgctgcggcccgcaccgatgagcgctcgatgcacgagttggttgaattgttgctgccgaacgacgtggccgcgttggagcagaacccagcggcccctaccgcgctgcgtgagctggcacgccgcttccgtagcgaaggtgatccggcggcaagctcctcgtccgccttgctgaatcgctccatcgctgccaagctgttggctcgcttgcataacggtggctatgtgctgccggcggatatttttgcaaatctgcctaatccgccggacccgttctttacccgtgcgcaaattgaccgcgaagctcgcaaggtgcgtgatggtattatgggtatgctgtatctgcagcgtatgccaaccgagtttgacgtcgctatggcaaccgtgtactatctggccgatcgtaacgtgagcggcgaaactttccatccgtctggtggtttgcgctacgagcgtaccccgaccggtggcgagctgttcggcctgccatcgccggaacgtctggcggagctggttggtagcacggtgtacctgatcggtgaacacctgaccgagcacctgaacctgctggctcgtgcctatttggagcgctacggtgcccgtcaagtggtgatgattgttgagacggaaaccggtgcggaaaccatgcgtcgtctgttgcatgatcacgtcgaggcaggtcgcctgatgactattgtggcaggtgatcagattgaggcagcgattgaccaagcgatcacgcgctatggccgtccgggtccggtggtgtgcactccattccgtccactgccaaccgttccgctggtcggtcgtaaagactccgattggagcaccgttttgagcgaggcggaatttgcggaactgtgtgagcatcagctgacccaccatttccgtgttgctcgtaagatcgccttgtcggatggcgcgtcgctggcgttggttaccccggaaacgactgcgactagcaccacggagcaatttgctctggcgaacttcatcaagaccaccctgcacgcgttcaccgcgaccatcggtgttgagtcggagcgcaccgcgcaacgtattctgattaaccaggttgatctgacgcgccgcgcccgtgcggaagagccgcgtgacccgcacgagcgtcagcaggaattggaacgcttcattgaagccgttctgctggttaccgctccgctgcctcctgaggcagacacgcgctacgcaggccgtattcaccgcggtcgtgcgattaccgtctaagacgaattctctagatatcgctcaatactgaccatttaaatcatacctgacctccatagcagaaagtcaaaagcctccgaccggaggcttttgacttgatcggcacgtaagaggttccaactttcaccataatgaaataagatcactaccgggcgtattttttgagttatcgagattttcaggagctaaggaagctaaaatgagtattcaacatttccgtgtcgcccttattcccttttttgcggcattttgccttcctgtttttgctcacccagaaacgctggtgaaagtaaaagatgctgaagatcagttgggtgcacgagtgggttacatcgaactggatctcaacagcggtaagatccttgagagtttacgccccgaagaacgttttccaatgatgagcacttttaaagttctgctatgtggcgcggtattatcccgtattgacgccgggcaagagcaactcggtcgccgcatacactattctcagaatgacttggttgagtactcaccagtcacagaaaagcatctcacggatggcatgacagtaagagaattatgcagtgctgccataaccatgagtgataacactgcggccaacttacttctggcaacgatcggaggaccgaaggagctaaccgcttttttgcacaacatgggggatcatgtaactcgccttgatcgttgggaaccggagctgaatgaagccataccaaacgacgagcgtgacaccacgatgcctgtagcaatggcaacaacgttgcgcaaactattaactggcgaactacttactctagcttcccggcaacaattaatagactggatggaggcggataaagttgcaggatcacttctgcgctcggccctcccggctggctggtttattgctgataaatctggagccggtgagcgtgggtctcgcggtatcattgcagcactggggccagatggtaagccctcccgcatcgtagttatctacacgacggggagtcaggcaactatggatgaacgaaatagacagatcgctgagataggtgcctcactgattaagcattggtaatgagggcccaaatgtaatcacctggctcaccttcgggtgggcctttctgcgttgctggcgtttttccataggctccgcccccctgacgagcatcacaaaaatcgatgctcaagtcagaggtggcgaaacccgacaggactataaagataccaggcgtttccccctggaagctccctcgtgcgctctcctgttccgaccctgccgcttaccggatacctgtccgcctttctcccttcgggaagcgtggcgctttctcatagctcacgctgtaggtatctcagttcggtgtaggtcgttcgctccaagctgggctgtgtgcacgaaccccccgttcagcccgaccgctgcgccttatccggtaactatcgtcttgagtccaacccggtaagacacgacttatcgccactggcagcagccactggtaacaggattagcagagcgaggtatgtaggcggtgctacagagttcttgaagtggtggcctaactacggctacactagaagaacagtatttggtatctgcgctctgctgaagccagttacctcggaaaaagagttggtagctcttgatccggcaaacaaaccaccgctggtagcggtggtttttttgtttgcaagcagcagattacgcgcagaaaaaaaggatctcaagaagatcctttgattttctaccgaagaaaggcccacccgtgaaggtgagccagtgagttgattgcagtccagttacgctggagtctgaggctcgtcctgaatgatatcaagcttgaattcgtt

SEQ ID NO: 807 - DNA, 27 bp, Artificial Sequence
  Description of Artificial Sequence: Synthetic Primer 1
gggaaccatggcaattggcataccaag

SEQ ID NO: 808 - DNA, 28 bp, Artificial Sequence
  Description of Artificial Sequence: Synthetic Primer 2
gggttacagagctttcaggattgcatcc

SEQ ID NO: 809 - DNA, 26 bp, Artificial Sequence
  Description of Artificial Sequence: Synthetic Primer 3
gggaacggcggggaaaaacaaacgtt

SEQ ID NO: 810 - DNA, 30 bp, Artificial Sequence
  Description of Artificial Sequence: Synthetic Primer 4
ggtccatggtaattctccacgcttataagc

SEQ ID NO: 811 - DNA, 2404 bp, Artificial Sequence; identical to SEQ ID NO: 7
  Description of Artificial Sequence: Synthetic pBT-3 vector polynucleotide

SEQ ID NO: 812 - DNA, 21 bp, Artificial Sequence
  Description of Artificial Sequence: Synthetic Primer 7
aacgaattcaagcttgatatc

SEQ ID NO: 813 - DNA, 21 bp, Artificial Sequence
  Description of Artificial Sequence: Synthetic Primer 8
gaattcgttgacgaattctct

SEQ ID NO: 814 - DNA, 24 bp, Artificial Sequence
  Description of Artificial Sequence: Synthetic Primer 9
ggaaacagctatgaccatgattac

SEQ ID NO: 815 - DNA, 26 bp, Artificial Sequence
  Description of Artificial Sequence: Synthetic Primer 10
ttgtaaaacgacggccagtgagcgcg

SEQ ID NO: 816 - DNA, 5592 bp, Artificial Sequence
  Description of Artificial Sequence: Synthetic pBT-3 -- PtiA:pntAB plasmid polynucleotide
aacgaattcaagcttgatatccactgtggaattcgcccttttacagagctttcaggattgcatccacgctggctttggcgtcaccaaacagcatgtgggtgttttccttgaagaacagcgggttttgcacaccagcatagccagtgttcatcgaacgtttaaagacaatcacgttctgcgctttccacacttccagcacaggcataccagcaatcggactcttcggatcatcctgcgccgccgggttaaccgtatcgttagcaccaatcaccagtacggtatcggtatcagcaaagtcatcattgatctcgtccatttccagcacgatgtcatacggtacttttgcttcagccagcaatacgttcatatgtccaggcaaacgccccgcgaccgggtggataccgaaacgcacattaataccacgagcgcgcaatttctcagtaatttcagcgacaggatattgcgcctgcgcgactgccatgccgtaccccggagtaatgatcactgaatgggagtttttcagcagttccgctgtctcttctgcggtgatttcgcggtgctcacccacttcctgatcatcgccagtagaagagccgtcggtgccgaaaccacccgcaataacgctgataaaggaacggttcatcgccttacacataatgtaagaaaggatagcccccgaagaaccgaccagcgcaccggtcacaatcagcaggtcgttgctgagcataaagcccgcagccgcagccgcccagccggagtacgagttcagcatcgacaccaccactggcatatctgcaccaccgatggaggcgactaaatgccagccgaataccagcgcaattgcggtcattatcagcaatgccagcacttgcaggccgacgctgtccgtgcgaacaaatacaatcagcagcaggaaggaaacgaccagagccgccaggttcattttgtgacggtttggcagcatcaatggtttagacgaaatcttgccacacagtttgccgaacgccaccaccgaacccgtgaacgttaccgccccgatgaagataccgaggaacacttccgtcaggtgaatattgaccagaatcggtgccattcccgcgtcatgatgcagatagctgttaaagccaaccagcactgccgccagacccacgaagctatgcaggatcgccaccagttctggcatttcggtcatttcaactttcttcgccagacggataccaattgccccaccaatgaccatcgccagcaagatccagccaacattacccgtatccggtccaaaaatggttgcgattaacgcaatcgccatcccggcgataccgaagttgttaccctggcgagacgtttcatgtttcgaaagaccggccagactgaagataaacaggatcgcggcaacaatgtatgcagctgtaactaatcctccagacatatgttaccccttaatttttgcggaacattttcagcatgcgctgagtcacggtgaagccaccgaaaatattaatgctggctataagcaccgcgataaaactaaggaagctaacccagccgccctggccaatctgcaacagtgctccgacaacaataatccctgaaatcgcgttggtgaccgacatcaacggtgtatgcagcgcgtgcgatacattccacaccacgtaataaccgacaacgcaggccagcgcgaaaacggtgaagtgcccaaggaattctttcggcgcaacgcttgccatccagccaaaaagaatgattgccagcgccatcaacgcgtatttacgccacggtgagcaggtacatttttcctcagttttcacttccggtgccgctttttgtgccgcctgcggctgagctgatacctgaatcggcggtgccggccaggtaatttcgcccgcacggatcacggtcacgccgcgaatcaccacatcatcaaaatcaacagtgatattgccgtctttctctttgcacaacagtttcagcagattaacgaggtttgtgccgtaaagctgtgaggattgcgtcggcagacggcccggaagatcggtataaccaatcactttgacaccattttccgtagtgaagatttcacccggcacggtgtattcacagttgccgccgttttgggctgccaggtcgacaatcacactgcccgccttcatggagtcaaccatttcacgggtaattagcttcggcgctggtttgcctggaataagcgcggtggtgacaatgatatcgacctcttttgcctgggcggcaaagagttccatttccgctttgatgaacgcgtccgacatcactttggcatagccatcgccgctgccagcttcctctttaaaatccagctcgaggaattccgcgcccatactttgaacttgttctttcacttccgggcgggtgtcgaatgcacgcacaatcgcgccgagactgtttgctgcgccaatggcggccagacctgcaacacccgcaccaatcaccatcacttttgccggtggcactttcccggccgcagtaatttgcccggtaaagaagcgcccaaattcatgtgccgcttcaacaatggcgcgataaccggcgatgttcgccatcgagcttagtgcgtccagcgattgtgcgcgtgagatacgcggcacagagtccatcgccatcacggtcacgttacgttccgcaagtttttgcattaattccggattctgcgcaggccagataaaactcaccagcgttgtcccaggattcagtaacgcaatttcatcatctaacggcgcattgaccttcagaatgatctctgactgccagacgctattcccttctacaatttcagcgcccgcttgcacaaacgctttatcgtcaaaacttgccagttgacccgcgccgctctctaccgcgacggtaaaacccagtttcagcagctgttccactgtttttggcgttgctgcaacacgggtttcattggttaaccgttctcttggtatgccaattcgcattttaattctccacgcttataagcgaataaaggaagatggccgccccgcagggcagcaggtctgtgaaacagtatagagattcatcggcacaaaggctttgctttttgtcatttattcaaaccaagggcgaattccacattggtcgctgcagcccgggggatccactagttctagagcggccgcaccgcgggagctagagaattcgtcaacgaattcaacgaattcaagcttgatatcattcaggacgagcctcagactccagcgtaactggactgaaaacaaactaaagcgcccttgtggcgctttagttttgttccgcggccaccggctggctcgcttcgctcggcccgtggacaaccctgctggacaagctgatggacaggctgcgcctgcccacgagcttgaccacagggattgcccaccggctacccagccttcgaccacatacccaccggctccaactgcgcggcctgcggccttgccccatcaatttttttaattttctctggggaaaagcctccggcctgcggcctgcgcgcttcgcttgccggttggacaccaagtggaaggcgggtcaaggctcgcgcagcgaccgcgcagcggcttggccttgacgcgcctggaacgacccaagcctatgcgagtgggggcagtcgaaggcgaagcccgcccgcctgccccccgagcctcacggcggcgagtgcgggggttccaagggggcagcgccaccttgggcaaggccgaaggccgcgcagtcgatcaacaagccccggaggggccactttttgccggagggggagccgcgccgaaggcgtgggggaaccccgcaggggtgcccttctttgggcaccaaagaactagatatagggcgaaatgcgaaagacttaaaaatcaacaacttaaaaaaggggggtacgcaacagctcattgcggcaccccccgcaatagctcattgcgtaggttaaagaaaatctgtaattgactgccacttttacgcaacgcataattgttgtcgcgctgccgaaaagttgcagctgattgcgcatggtgccgcaaccgtgcggcaccctaccgcatggagataagcatggccacgcagtccagagaaatcggcattcaagccaagaacaagcccggtcactgggtgcaaacggaacgcaaagcgcatgaggcgtgggccgggcttattgcgaggaaacccacggcggcaatgctgctgcatcacctcgtggcgcagatgggccaccagaacgccgtggtggtcagccagaagacactttccaagctcatcggacgttctttgcggacggtccaatacgcagtcaaggacttggtggccgagcgctggatctccgtcgtgaagctcaacggccccggcaccgtgtcggcctacgtggtcaatgaccgcgtggcgtggggccagccccgcgaccagttgcgcctgtcggtgttcagtgccgccgtggtggttgatcacgacgaccaggacgaatcgctgttggggcatggcgacctgcgccgcatcccgaccctgtatccgggcgagcagcaactaccgaccggccccggcgaggagccgcccagccagcccggcattccgggcatggaaccagacctgccagccttgaccgaaacggaggaatgggaacggcgcgggcagcagcgcctgccgatgcccgatgagccgtgttttctggacgatggcgagccgttggagccgccgacacgggtcacgctgccgcgccggtagtacgtaagaggttccaactttcaccataatgaaataagatcactaccgggcgtattttttgagttatcgagattttcaggagctaaggaagctaaaatggagaaaaaaatcactggatataccaccgttgatatatcccaatggcatcgtaaagaacattttgaggcatttcagtcagttgctcaatgtacctataaccagaccgttcagctggatattacggcctttttaaagaccgtaaagaaaaataagcacaagttttatccggcctttattcacattcttgcccgcctgatgaatgctcatccggaattccgtatggcaatgaaagacggtgagctggtgatatgggatagtgttcacccttgttacaccgttttccatgagcaaactgaaacgttttcatcgctctggagtgaataccacgacgatttccggcagtttctacacatatattcgcaagatgtggcgtgttacggtgaaaacctggcctatttccctaaagggtttattgagaatatgtttttcgtctcagccaatccctgggtgagtttcaccagttttgatttaaacgtggccaatatggacaacttcttcgcccccgttttcaccatgggcaaatattatacgcaaggcgacaaggtgctgatgccgctggcgattcaggttcatcatgccgtttgtgatggcttccatgtcggcagaatgcttaatgaattacaacagtactgcgatgagtggcagggcggggcgtaaacgcgtggatccccctcaagtcaaaagcctccggtcggaggcttttgactttctgctatggaggtcaggtatgatttaaatggtcagtattgagcgatatctagagaattcgtc

SEQ ID NO: 817 - DNA, 7263 bp, Artificial Sequence
  Description of Artificial Sequence: Synthetic pj251:26385 plasmid polynucleotide
gcttttagaaaaactcatcgagcatcaaatgaaactgcaatttattcatatcaggattatcaataccatatttttgaaaaagccgtttctgtaatgaaggagaaaactcaccgaggcagttccataggatggcaagatcctggtatcggtctgcgattccgactcgtccaacatcaatacaacctattaatttcccctcgtcaaaaataaggttatcaagtgagaaatcaccatgagtgacgactgaatccggtgagaatggcaaaagtttatgcatttctttccagacttgttcaacaggccagccattacgctcgtcatcaaaatcactcgcatcaaccaaaccgttattcattcgtgattgcgcctgagcgaggcgaaatacgcgatcgctgttaaaaggacaattacaaacaggaatcgagtgcaaccggcgcaggaacactgccagcgcatcaacaatattttcacctgaatcaggatattcttctaatacctggaacgctgtttttccggggatcgcagtggtgagtaaccatgcatcatcaggagtacggataaaatgcttgatggtcggaagtggcataaattccgtcagccagtttagtctgaccatctcatctgtaacatcattggcaacgctacctttgccatgtttcagaaacaactctggcgcatcgggcttcccatacaagcgatagattgtcgcacctgattgcccgacattatcgcgagcccatttatacccatataaatcagcatccatgttggaatttaatcgcggcctcgacgtttcccgttgaatatggctcatattcttcctttttcaatattattgaagcatttatcagggttattgtctcatgagcggatacatatttgaatgtatttagaaaaataaacaaataggggtcagtgttacaaccaattaaccaattctgaacattatcgcgagcccatttatacctgaatatggctcataacaccccttgtttgcctggcggcagtagcgcggtggtcccacctgaccccatgccgaactcagaagtgaaacgccgtagcgccgatggtagtgtggggactccccatgcgagagtagggaactgccaggcatcaaataaaacgaaaggctcagtcgaaagactgggcctttcgcccgggctaattagggggtgtcgcccttattcgactctatagggaagttcctattctctagaaagtataggaacttctgaaggggggacagctgtctcaaatgtctcggaatcgctgacgattcccaggtttctccggcaagcatagcgcatggcgtctccatgcgagaatgtcgcgcttgccggataaaaggggagccgctatcggaatggacgcaagccacggccgcagcaggtgcggtcgagggcttccagccagttccagggcagatgtgccggcagaccctcccgctttgggggaggcgcaagccgggtccattcggatagcatctccccatgcaaagtgccggccagggcaatgcccggagccggttcgaggcgccggtttgaataaatgacaaaaagcaaagcctttgtgccgatgaatctctatactgtttcacagacctgctgccctgcggggcaggaggaaaaacatgtccctgaacttcctggacttcgagcagccgattgcagaactggaagcgaagattgacagcctgaccgcggttagccgtcaagatgagaaactggacattaacatcgacgaagaggtccaccgtttgcgtgagaagtctgttgaactgactcgcaaaatctttgctgatttgggcgcatggcagattgcccagttggctcgccacccacaacgcccatataccctggactacgtgcgcctggcgtttgacgagttcgacgaactggcaggcgaccgcgcctatgcggacgataaagcaattgtcggcggtattgctcgtttggatggccgtccggtgatgattatcggccatcaaaaaggccgcgagacgaaagaaaagattcgtcgtaactttggtatgccggcaccggagggctaccgcaaggccctgcgtctgatgcaaatggccgaacgctttaagatgccgattatcacgttcattgatacgccgggtgcgtacccaggcgttggtgcggaagagcgtggtcagagcgaggccatcgcacgtaacctgcgtgagatgtctcgtctgggtgtgccggtcgtttgcaccgtgattggcgagggcggtagcggtggtgcgttggcgatcggtgtcggtgataaggtcaacatgctgcaatacagcacgtacagcgtcattagcccggaaggttgcgcttccattctgtggaagagcgcggataaagcaccattggcagcggaagcgatgggtatcatcgcaccgcgtctgaaagaactgaagttgattgattctatcatcccggaaccgctgggcggtgctcaccgtaatccggaggcgatggcagccagcctgaaggcccagctgctggcggacctggcggatctggacgtgctgagcacggaggatctgaaaaaccgtcgctatcagcgcttgatgagctatggctacgcgtagtaaaggaggaaaatcatgagctggattgaacgcattaagtccaatatcaccccgacccgcaaggcgagcatccctgaaggcgtctggaccaaatgcgatagctgcggtcaggttttgtatcgtgcggagctggagcgtaacctggaagtgtgcccgaaatgcgaccatcacatgcgtatgaccgctcgtaatcgtctgcatagcctgctggatgagggcagcctggtcgagctgggtagcgaactggaaccgaaagatgttctgaaattccgtgattccaagaagtataaggatcgtttggcatctgcacaaaaagaaaccggtgagaaggacgcactggttgttatgaaaggcaccctgtatggtatgccggttgttgctgcggcgttcgagtttgcgtttatgggtggcagcatgggttccgtggtgggcgcacgctttgtgcgtgccgtggagcaggcgctggaggataactgtcctctgatttgtttcagcgcgagcggtggtgcgcgtatgcaagaggccctgatgagcctgatgcagatggcaaaaacctcggcagccctggcgaagatgcaagaacgcggcctgccgtacatttccgtcctgaccgaccctacgatgggcggtgtcagcgccagctttgcgatgctgggtgatttgaacatcgcagagccgaaggctctgattggttttgctggtccgcgtgttattgaacagacggttcgcgaaaagttgccgcctggtttccagcgcagcgagttcctgattgagaaaggtgccatcgacatgatcgttcgccgtccagaaatgcgtctgaaactggcgagcattctggcgaaattgatgaatctgccggctccgaatcctgaagcaccgcgtgagggtgtcgtggttccgccggtcccggaccaagagccggaggcataatagcacgtggagttaaccacgcggcttgccaacggggtctgaatcgctttttttgtatataatgcgtgtgaaatttcataccacaggcgaaggaggaaaaaccatggacattcgtaagatcaagaaactgattgaactggttgaagaaagcggcatcagcgagctggagatcagcgaaggtgaagagagcgtccgtatttcccgtgcggcaccggcagcgagctttccggttatgcagcaagcatacgccgctccgatgatgcaacagccggcacagagcaacgccgctgcaccggcgaccgttccaagcatggaggcaccggcagcggccgagatttcgggtcatatcgtgcgtagcccgatggtgggcaccttctatcgcacgccgtcgccggacgcaaaagccttcatcgaagtcggccagaaggtcaatgtcggcgacacgctgtgtatcgttgaggcaatgaaaatgatgaaccagattgaagcggataagagcggtactgttaaagcgatcctggtggaatccggccagcctgttgagttcgatgaaccgctggttgtgatcgagtaacgaggcgaacatgttggacaagatcgtgattgcaaaccgcggtgaaatcgcgctgcgtatcttgcgcgcgtgtaaagagctgggcattaagactgttgccgtgcattccagcgcagaccgcgacctgaagcatgttctgctggccgacgaaacggtttgcatcggtccggcaccgagcgtgaaaagctatctgaacatcccggccatcatctctgcggcagagatcaccggtgcagtggcgattcatccgggctacggtttcctgagcgagaacgctaactttgctgaacaagtggagcgtagcggtttcatcttcattggccctaaggcggagacgattcgcctgatgggcgacaaagtgagcgccattgcagcgatgaaaaaggccggtgtgccgtgtgttccgggcagcgatggtccgctgggtgacgatatggacaagaaccgtgccatcgctaaacgtattggctacccggtcattatcaaagcctctggtggtggcggtggccgtggtatgcgtgtcgtccgtggtgatgcggaactggcgcaaagcatcagcatgacccgtgcggaagccaaagcggcgttctctaacgatatggtgtatatggagaagtatctggagaatccgcgccacgttgaaatccaagttctggcggatggtcagggcaatgcgatctacttggcagaacgtgattgctccatgcaacgccgtcatcagaaggtggtggaagaggcaccggctccgggtattacgccggaactgcgtcgctacatcggtgagcgctgtgcgaaagcgtgtgtggacattggttaccgtggtgcgggtacgtttgagttcctgttcgaaaatggtgagttttacttcattgaaatgaatacccgcatccaggttgagcacccggtgaccgagatgattactggcgttgatctgatcaaagagcaactgcgcattgcggctggtcagccgctgtcgatcaagcaagaagaggtgcacgttcgtggtcacgcggtcgagtgccgtatcaatgcggaggacccgaatacctttctgccgagccctggtaagatcacgcgttttcacgcgccaggtggttttggcgttcgttgggagtctcacatctacgccggttacaccgtgccgccgtactatgacagcatgattggtaaactgatctgctatggcgaaaatcgtgatgtcgcgatcgcccgcatgaaaaacgcgctgcaagagctgatcattgatggcattaagaccaatgtggatttgcagatccgcattatgaacgacgagaatttccagcacggcggtacgaacattcactacctggaaaagaaactgggcctgcaagagaaataatagggtaccctagcataaccccttggggcctctaaacgggtcttgaggggttttttgaatcccccgggatgtctatcttaaggtagccaaagtttaaactttggctaccttaagatagacatactgccggcctggttcaaccagtcggcagccggcgctggcgcccgcgtattgcggtgcagccagcgcggcgcacaaggcggcgggcgtttcgtttcgccgcccgtttcgcgggccgtcaaggcccgcgaatcgtttctgcccgcgcggcattcctcgctttttgcgccaattcaccgggttttccttaagccccgtcgcttttcttagtgccttgttgggcatagaatcagggcagcggcgcagccagcaccatgttcgtgcagcgcggccctcgcgggggcgaggctgcagacagctgtcaaaatgaagggaagttcctatactttctagagaataggaacttctatagggagtcgaataagggcgacacaaaaggtattctaaatgcataataaatactgataacatcttatagtttgtattatattttgtattatcgttgacatgtataattttgatatcaaaaactgattttccctttattattttcgagatttattttcttaattctctttaacaaactagaaatattgtatatacaaaaaatcataaataatagatgaatagtttaattataggtgttcatcaatcgaaaaagcaacgtatcttatttaaagtgcgttgcttttttctcatttataaggttaaataattctcatatatcaagcaaagtgacaggcgcccttaaatattctgacaaatgctctttccctaaactccccccataaaaaaacccgccgaagcgggtttttacgttatttgcggattaacgattactcgttatcagaaccgcccaggatgcctggcagttccctactctcgccgctgcgctcggtcgttcggctgcgggacctcagcgctagcggagtgtatactggcttactatgttggcactgatgagggtgtcagtgaagtgcttcatgtggcaggagaaaaaaggctgcaccggtgcgtcagcagaatatgtgatacaggatatattccgcttcctcgctcactgactcgctacgctcggtcgttcgactgcggcgagcggaaatggcttacgaacggggcggagatttcctggaagatgccaggaagatacttaacagggaagtgagagggccgcggcaaagccgtttttccataggctccgcccccctgacaagcatcacgaaatctgacgctcaaatcagtggtggcgaaacccgacaggactataaagataccaggcgtttccccctggcggctccctcgtgcgctctcctgttcctgcctttcggtttaccggtgtcattccgctgttatggccgcgtttgtctcattccacgcctgacactcagttccgggtaggcagttcgctccaagctggactgtatgcacgaaccccccgttcagtccgaccgctgcgccttatccggtaactatcgtcttgagtccaacccggaaagacatgcaaaagcaccactggcagcagccactggtaattgatttagaggagttagtcttgaagtcatgcgccggttaaggctaaactgaaaggacaagttttggtgactgcgctcctccaagccagttacctcggttcaaagagttggtagctcagagaaccttcgaaaaaccgccctgcaaggcggttttttcgttttcagagcaagagattacgcgcagaccaaaacgatctcaagaagatcatcttattaa

SEQ ID NO: 818 - DNA, 22 bp, Artificial Sequence
  Description of Artificial Sequence: Synthetic pcr Primer 1
gcggggcaggaggaaaaacatg

SEQ ID NO: 819 - DNA, 45 bp, Artificial Sequence
  Description of Artificial Sequence: Synthetic Primer 1
gcttataagcgaataaaggaagatggccgccccgcagggcagcag

SEQ ID NO: 820 - DNA, 7298 bp, Artificial Sequence
  Description of Artificial Sequence: Synthetic pJ251:PtpiA:accAD-PrpiA:accBC polynucleotide
gcttttagaaaaactcatcgagcatcaaatgaaactgcaatttattcatatcaggattatcaataccatatttttgaaaaagccgtttctgtaatgaaggagaaaactcaccgaggcagttccataggatggcaagatcctggtatcggtctgcgattccgactcgtccaacatcaatacaacctattaatttcccctcgtcaaaaataaggttatcaagtgagaaatcaccatgagtgacgactgaatccggtgagaatggcaaaagtttatgcatttctttccagacttgttcaacaggccagccattacgctcgtcatcaaaatcactcgcatcaaccaaaccgttattcattcgtgattgcgcctgagcgaggcgaaatacgcgatcgctgttaaaaggacaattacaaacaggaatcgagtgcaaccggcgcaggaacactgccagcgcatcaacaatattttcacctgaatcaggatattcttctaatacctggaacgctgtttttccggggatcgcagtggtgagtaaccatgcatcatcaggagtacggataaaatgcttgatggtcggaagtggcataaattccgtcagccagtttagtctgaccatctcatctgtaacatcattggcaacgctacctttgccatgtttcagaaacaactctggcgcatcgggcttcccatacaagcgatagattgtcgcacctgattgcccgacattatcgcgagcccatttatacccatataaatcagcatccatgttggaatttaatcgcggcctcgacgtttcccgttgaatatggctcatattcttcctttttcaatattattgaagcatttatcagggttattgtctcatgagcggatacatatttgaatgtatttagaaaaataaacaaataggggtcagtgttacaaccaattaaccaattctgaacattatcgcgagcccatttatacctgaatatggctcataacaccccttgtttgcctggcggcagtagcgcggtggtcccacctgaccccatgccgaactcagaagtgaaacgccgtagcgccgatggtagtgtggggactccccatgcgagagtagggaactgccaggcatcaaataaaacgaaaggctcagtcgaaagactgggcctttcgcccgggctaattagggggtgtcgcccttattcgactctatagggaagttcctattctctagaaagtataggaacttctgaaggggggacagctgtctcaaatgtctcggaatcgctgacgattcccaggtttctccggcaagcatagcgcatggcgtctccatgcgagaatgtcgcgcttgccggataaaaggggagccgctatcggaatggacgcaagccacggccgcagcaggtgcggtcgagggcttccagccagttccagggcagatgtgccggcagaccctcccgctttgggggaggcgcaagccgggtccattcggatagcatctccccatgcaaagtgccggccagggcaatgcccggagccggttcgaggcgccggtttgaataaatgacaaaaagcaaagcctttgtgccgatgaatctctatactgtttcacagacctgctgccctgcggggcggccatcttcctttattcgcttataagcgcggggcaggaggaaaaacatgtccctgaacttcctggacttcgagcagccgattgcagaactggaagcgaagattgacagcctgaccgcggttagccgtcaagatgagaaactggacattaacatcgacgaagaggtccaccgtttgcgtgagaagtctgttgaactgactcgcaaaatctttgctgatttgggcgcatggcagattgcccagttggctcgccacccacaacgcccatataccctggactacgtgcgcctggcgtttgacgagttcgacgaactggcaggcgaccgcgcctatgcggacgataaagcaattgtcggcggtattgctcgtttggatggccgtccggtgatgattatcggccatcaaaaaggccgcgagacgaaagaaaagattcgtcgtaactttggtatgccggcaccggagggctaccgcaaggccctgcgtctgatgcaaatggccgaacgctttaagatgccgattatcacgttcattgatacgccgggtgcgtacccaggcgttggtgcggaagagcgtggtcagagcgaggccatcgcacgtaacctgcgtgagatgtctcgtctgggtgtgccggtcgtttgcaccgtgattggcgagggcggtagcggtggtgcgttggcgatcggtgtcggtgataaggtcaacatgctgcaatacagcacgtacagcgtcattagcccggaaggttgcgcttccattctgtggaagagcgcggataaagcaccattggcagcggaagcgatgggtatcatcgcaccgcgtctgaaagaactgaagttgattgattctatcatcccggaaccgctgggcggtgctcaccgtaatccggaggcgatggcagccagcctgaaggcccagctgctggcggacctggcggatctggacgtgctgagcacggaggatctgaaaaaccgtcgctatcagcgcttgatgagctatggctacgcgtagtaaaggaggaaaatcatgagctggattgaacgcattaagtccaatatcaccccgacccgcaaggcgagcatccctgaaggcgtctggaccaaatgcgatagctgcggtcaggttttgtatcgtgcggagctggagcgtaacctggaagtgtgcccgaaatgcgaccatcacatgcgtatgaccgctcgtaatcgtctgcatagcctgctggatgagggcagcctggtcgagctgggtagcgaactggaaccgaaagatgttctgaaattccgtgattccaagaagtataaggatcgtttggcatctgcacaaaaagaaaccggtgagaaggacgcactggttgttatgaaaggcaccctgtatggtatgccggttgttgctgcggcgttcgagtttgcgtttatgggtggcagcatgggttccgtggtgggcgcacgctttgtgcgtgccgtggagcaggcgctggaggataactgtcctctgatttgtttcagcgcgagcggtggtgcgcgtatgcaagaggccctgatgagcctgatgcagatggcaaaaacctcggcagccctggcgaagatgcaagaacgcggcctgccgtacatttccgtcctgaccgaccctacgatgggcggtgtcagcgccagctttgcgatgctgggtgatttgaacatcgcagagccgaaggctctgattggttttgctggtccgcgtgttattgaacagacggttcgcgaaaagttgccgcctggtttccagcgcagcgagttcctgattgagaaaggtgccatcgacatgatcgttcgccgtccagaaatgcgtctgaaactggcgagcattctggcgaaattgatgaatctgccggctccgaatcctgaagcaccgcgtgagggtgtcgtggttccgccggtcccggaccaagagccggaggcataatagcacgtggagttaaccacgcggcttgccaacggggtctgaatcgctttttttgtatataatgcgtgtgaaatttcataccacaggcgaaggaggaaaaaccatggacattcgtaagatcaagaaactgattgaactggttgaagaaagcggcatcagcgagctggagatcagcgaaggtgaagagagcgtccgtatttcccgtgcggcaccggcagcgagctttccggttatgcagcaagcatacgccgctccgatgatgcaacagccggcacagagcaacgccgctgcaccggcgaccgttccaagcatggaggcaccggcagcggccgagatttcgggtcatatcgtgcgtagcccgatggtgggcaccttctatcgcacgccgtcgccggacgcaaaagccttcatcgaagtcggccagaaggtcaatgtcggcgacacgctgtgtatcgttgaggcaatgaaaatgatgaaccagattgaagcggataagagcggtactgttaaagcgatcctggtggaatccggccagcctgttgagttcgatgaaccgctggttgtgatcgagtaacgaggcgaacatgttggacaagatcgtgattgcaaaccgcggtgaaatcgcgctgcgtatcttgcgcgcgtgtaaagagctgggcattaagactgttgccgtgcattccagcgcagaccgcgacctgaagcatgttctgctggccgacgaaacggtttgcatcggtccggcaccgagcgtgaaaagctatctgaacatcccggccatcatctctgcggcagagatcaccggtgcagtggcgattcatccgggctacggtttcctgagcgagaacgctaactttgctgaacaagtggagcgtagcggtttcatcttcattggccctaaggcggagacgattcgcctgatgggcgacaaagtgagcgccattgcagcgatgaaaaaggccggtgtgccgtgtgttccgggcagcgatggtccgctgggtgacgatatggacaagaaccgtgccatcgctaaacgtattggctacccggtcattatcaaagcctctggtggtggcggtggccgtggtatgcgtgtcgtccgtggtgatgcggaactggcgcaaagcatcagcatgacccgtgcggaagccaaagcggcgttctctaacgatatggtgtatatggagaagtatctggagaatccgcgccacgttgaaatccaagttctggcggatggtcagggcaatgcgatctacttggcagaacgtgattgctccatgcaacgccgtcatcagaaggtggtggaagaggcaccggctccgggtattacgccggaactgcgtcgctacatcggtgagcgctgtgcgaaagcgtgtgtggacattggttaccgtggtgcgggtacgtttgagttcctgttcgaaaatggtgagttttacttcattgaaatgaatacccgcatccaggttgagcacccggtgaccgagatgattactggcgttgatctgatcaaagagcaactgcgcattgcggctggtcagccgctgtcgatcaagcaagaagaggtgcacgttcgtggtcacgcggtcgagtgccgtatcaatgcggaggacccgaatacctttctgccgagccctggtaagatcacgcgttttcacgcgccaggtggttttggcgttcgttgggagtctcacatctacgccggttacaccgtgccgccgtactatgacagcatgattggtaaactgatctgctatggcgaaaatcgtgatgtcgcgatcgcccgcatgaaaaacgcgctgcaagagctgatcattgatggcattaagaccaatgtggatttgcagatccgcattatgaacgacgagaatttccagcacggcggtacgaacattcactacctggaaaagaaactgggcctgcaagagaaataatagggtaccctagcataaccccttggggcctctaaacgggtcttgaggggttttttgaatcccccgggatgtctatcttaaggtagccaaagtttaaactttggctaccttaagatagacatactgccggcctggttcaaccagtcggcagccggcgctggcgcccgcgtattgcggtgcagccagcgcggcgcacaaggcggcgggcgtttcgtttcgccgcccgtttcgcgggccgtcaaggcccgcgaatcgtttctgcccgcgcggcattcctcgctttttgcgccaattcaccgggttttccttaagccccgtcgcttttcttagtgccttgttgggcatagaatcagggcagcggcgcagccagcaccatgttcgtgcagcgcggccctcgcgggggcgaggctgcagacagctgtcaaaatgaagggaagttcctatactttctagagaataggaacttctatagggagtcgaataagggcgacacaaaaggtattctaaatgcataataaatactgataacatcttatagtttgtattatattttgtattatcgttgacatgtataattttgatatcaaaaactgattttccctttattattttcgagatttattttcttaattctctttaacaaactagaaatattgtatatacaaaaaatcataaataatagatgaatagtttaattataggtgttcatcaatcgaaaaagcaacgtatcttatttaaagtgcgttgcttttttctcatttataaggttaaataattctcatatatcaagcaaagtgacaggcgcccttaaatattctgacaaatgctctttccctaaactccccccataaaaaaacccgccgaagcgggtttttacgttatttgcggattaacgattactcgttatcagaaccgcccaggatgcctggcagttccctactctcgccgctgcgctcggtcgttcggctgcgggacctcagcgctagcggagtgtatactggcttactatgttggcactgatgagggtgtcagtgaagtgcttcatgtggcaggagaaaaaaggctgcaccggtgcgtcagcagaatatgtgatacaggatatattccgcttcctcgctcactgactcgctacgctcggtcgttcgactgcggcgagcggaaatggcttacgaacggggcggagatttcctggaagatgccaggaagatacttaacagggaagtgagagggccgcggcaaagccgtttttccataggctccgcccccctgacaagcatcacgaaatctgacgctcaaatcagtggtggcgaaacccgacaggactataaagataccaggcgtttccccctggcggctccctcgtgcgctctcctgttcctgcctttcggtttaccggtgtcattccgctgttatggccgcgtttgtctcattccacgcctgacactcagttccgggtaggcagttcgctccaagctggactgtatgcacgaaccccccgttcagtccgaccgctgcgccttatccggtaactatcgtcttgagtccaacccggaaagacatgcaaaagcaccactggcagcagccactggtaattgatttagaggagttagtcttgaagtcatgcgccggttaaggctaaactgaaaggacaagttttggtgactgcgctcctccaagccagttacctcggttcaaagagttggtagctcagagaaccttcgaaaaaccgccctgcaaggcggttttttcgttttcagagcaagagattacgcgcagaccaaaacgatctcaagaagatcatcttattaa

SEQ ID NO: 821 - DNA, 17 bp, Artificial Sequence
  Description of Artificial Sequence: Synthetic pcr Primer FW043
atgggttttctttccgg

SEQ ID NO: 822 - DNA, 19 bp, Artificial Sequence
  Description of Artificial Sequence: Synthetic pcr Primer FW047
ttatttcagttcgagttcg

SEQ ID NO: 823 - DNA, 21 bp, Artificial Sequence
  Description of Artificial Sequence: Synthetic pcr Primer FW044
ctatccatcgcctacggtatc

SEQ ID NO: 824 - DNA, 18 bp, Artificial Sequence
  Description of Artificial Sequence: Synthetic pcr Primer FW045
cgttgcaatggcaaaagc

SEQ ID NO: 825 - DNA, 18 bp, Artificial Sequence
  Description of Artificial Sequence: Synthetic pcr Primer FW046
cggcggtttcagcattgc

SEQ ID NO: 826 - protein, 359 aa, Sulfolobus tokodaii
MILMRRTLKAAILGATGLVGIEYVRMLSNHPYIKPAYLAGKGSVGKPYGEVVRWQTVGQVPKEIADMEIKPTDPKLMDDVDIIFSPLPQGAAGPVEEQFAKEGFPVISNSPDHRFDPDVPLLVPELNPHTISLIDEQRKRREWKGFIVTTPLCTAQGAAIPLGAIFKDYKMDGAFITTIQSLSGAGYPGIPSLDVVDNILPLGDGYDAKTIKEIFRILSEVKRNVDEPKLEDVSLAATTHRIATIHGHYEVLYVSFKEETAAEKVKETLENFRGEPQDLKLPTAPSKPIIVMNEDTRPQVYFDRWAGDIPGMSVVVGRLKQVNKRMIRLVSLIHNTVRGAAGGGILAAELLVEKGYIEK

SEQ ID NO: 827 - DNA, 780 bp, Escherichia coli
atgggttttctttccggtaagcgcattctggtaaccggtgttgccagcaaactatccatcgcctacggtatcgctcaggcgatgcaccgcgaaggagctgaactggcattcacctaccagaacgacaaactgaaaggccgcgtagaagaatttgccgctcaattgggttctgacatcgttctgcagtgcgatgttgcagaagatgccagcatcgacaccatgttcgctgaactggggaaagtttggccgaaatttgacggtttcgtacactctattggttttgcacctggcgatcagctggatggtgactatgttaacgccgttacccgtgaaggcttcaaaattgcccacgacatcagctcctacagcttcgttgcaatggcaaaagcttgccgctccatgctgaatccgggttctgccctgctgaccctttcctaccttggcgctgagcgcgctatcccgaactacaacgttatgggtctggcaaaagcgtctctggaagcgaacgtgcgctatatggcgaacgcgatgggtccggaaggtgtgcgtgttaacgccatctctgctggtccgatccgtactctggcggcctccggtatcaaagacttccgcaaaatgctggctcattgcgaagccgttaccccgattcgccgtaccgttactattgaagatgtgggtaactctgcggcattcctgtgctccgatctctctgccggtatctccggtgaagtggtccacgttgacggcggtttcagcattgctgcaatgaacgaactcgaa

SEQ ID NO: 828 - protein, 262 aa, Escherichia coli
MGFLSGKRILVTGVASKLSIAYGIAQAMHREGAELAFTYQNDKLKGRVEEFAAQLGSDIVLQCDVAEDASIDTMFAELGKVWPKFDGFVHSIGFAPGDQLDGDYVNAVTREGFKIAHDISSYSFVAMAKACRSMLNPGSALLTLSYLGAERAIPNYNVMGLAKASLEANVRYMANAMGPEGVRVNAISAGPIRTLAASGIKDFRKMLAHCEAVTPIRRTVTIEDVGNSAAFLCSDLSAGISGEVVHVDGGFSIAAMNELELK

SEQ ID NO: 829 - DNA, 21 bp, Artificial Sequence
  Description of Artificial Sequence: Synthetic primer
gagcacagtatcgcaaacatg

SEQ ID NO: 830 - DNA, 18 bp, Artificial Sequence
  Description of Artificial Sequence: Synthetic primer
ctgccagcctggaaaaag

SEQ ID NO: 831 - DNA, 20 bp, Artificial Sequence
  Description of Artificial Sequence: Synthetic primer
tctatgggttgcggttgaat

SEQ ID NO: 832 - DNA, 23 bp, Artificial Sequence
  Description of Artificial Sequence: Synthetic primer
tgagactgactgttaataagcgc

SEQ ID NO: 833 - DNA, 23 bp, Artificial Sequence
  Description of Artificial Sequence: Synthetic primer
tagttttattgggtgtccggccc

SEQ ID NO: 834 - DNA, 23 bp, Artificial Sequence
  Description of Artificial Sequence: Synthetic primer
agcagcttataacgccggaccag

SEQ ID NO: 835 - DNA, 23 bp, Artificial Sequence
  Description of Artificial Sequence: Synthetic primer
tggaactattggccaaactaatg

SEQ ID NO: 836 - DNA, 23 bp, Artificial Sequence
  Description of Artificial Sequence: Synthetic primer
cgttgattttccggcagaagtca

SEQ ID NO: 837 - DNA, 16 bp, Artificial Sequence
  Description of Artificial Sequence: Synthetic primer
gcgcccatacgcccac

SEQ ID NO: 838 - DNA, 21 bp, Artificial Sequence
  Description of Artificial Sequence: Synthetic primer
gccgtgggcgaaaaacggctt

SEQ ID NO: 839 - DNA, 70 bp, Artificial Sequence
  Description of Artificial Sequence: Synthetic primer
cgtgcataacgtgttgggttcataaaacattaatttcggtttcgggtgacgtgtaggctggagctgcttc

SEQ ID NO: 840 - DNA, 75 bp, Artificial Sequence
  Description of Artificial Sequence: Synthetic primer
ggctccctgacgtttttttagccacgtatcaattataggtacttccatgtcgagtgtgtaggctggagctgcttc

SEQ ID NO: 841 - DNA, 24 bp, Artificial Sequence
  Description of Artificial Sequence: Synthetic primer
aatcttgcttacgccacctggaag

SEQ ID NO: 842 - DNA, 25 bp, Artificial Sequence
  Description of Artificial Sequence: Synthetic primer
caggcagcgcatcaggcagccctgg

SEQ ID NO: 843 - DNA, 20 bp, Artificial Sequence
  Description of Artificial Sequence: Synthetic primer
ccattacctcaacggcaaaa

SEQ ID NO: 844 - DNA, 20 bp, Artificial Sequence
  Description of Artificial Sequence: Synthetic primer
aagcaataacgttccggttg

SEQ ID NO: 845 - DNA, 20 bp, Artificial Sequence
  Description of Artificial Sequence: Synthetic primer
gcgctgattggcacacctga

SEQ ID NO: 846 - DNA, 28 bp, Artificial Sequence
  Description of Artificial Sequence: Synthetic primer
attgaaaggttggtgcaacagcatgttg

SEQ ID NO: 847 - DNA, 24 bp, Artificial Sequence
  Description of Artificial Sequence: Synthetic primer
tggtcccgtgatgtcgcgttatac

SEQ ID NO: 848 - DNA, 20 bp, Artificial Sequence
  Description of Artificial Sequence: Synthetic primer
gaactggcgaagaaagtgga

SEQ ID NO: 849 - DNA, 21 bp, Artificial Sequence
  Description of Artificial Sequence: Synthetic primer
tgccgaagaggtgaataacgc

SEQ ID NO: 850 - DNA, 20 bp, Artificial Sequence
  Description of Artificial Sequence: Synthetic primer
atcatgctgccgagcatacg

SEQ ID NO: 851 - DNA, 22 bp, Artificial Sequence
  Description of Artificial Sequence: Synthetic primer
ctccccagtcgatattctcgtg

SEQ ID NO: 852 - DNA, 70 bp, Artificial Sequence
  Description of Artificial Sequence: Synthetic primer
ttaccgctattgctgaaggtcgtcgttaatcacaaagcgggtcgcccttgcatatgaatatcctccttag

SEQ ID NO: 853 - DNA, 75 bp, Artificial Sequence
  Description of Artificial Sequence: Synthetic primer
ttccggttcagatatccgcagcgcaaagctgcggatgatgacgagattactgctgcatatgaatatcctccttag

SEQ ID NO: 854 - DNA, 23 bp, Artificial Sequence
  Description of Artificial Sequence: Synthetic primer
gcaaatagttgtgcagagggcgg

SEQ ID NO: 855 - DNA, 21 bp, Artificial Sequence
  Description of Artificial Sequence: Synthetic primer
ccagtggggagctacattctc

SEQ ID NO: 856 - DNA, 24 bp, Artificial Sequence
  Description of Artificial Sequence: Synthetic primer
cgtcattcagatgctggcgcgatc

SEQ ID NO: 857 - DNA, 17 bp, Artificial Sequence
  Description of Artificial Sequence: Synthetic primer
atgggttttctttccgg

SEQ ID NO: 858 - DNA, 80 bp, Artificial Sequence
  Description of Artificial Sequence: Synthetic primer
caggtttgcggcgtccagcggttatgtaactactattcggcgcgacttacgccgctccccgctcgcgataatgtggtagc

SEQ ID NO: 859 - DNA, 80 bp, Artificial Sequence
  Description of Artificial Sequence: Synthetic primer
aataaaaccaatgatttggctaatgatcacacagtcccaggcagtaagaccgacgtcattctatcatgccataccgcgaa

SEQ ID NO: 860 - DNA, 21 bp, Artificial Sequence
  Description of Artificial Sequence: Synthetic primer
gagataagcctgaaatgtcgc

SEQ ID NO: 861 - DNA, 21 bp, Artificial Sequence
  Description of Artificial Sequence: Synthetic primer
cagtccagttacgctggagtc

SEQ ID NO: 862 - DNA, 26 bp, Artificial Sequence
  Description of Artificial Sequence: Synthetic primer
actgaccatttaaatcatacctgacc

SEQ ID NO: 863 - DNA, 1207 bp, Artificial Sequence
  Description of Artificial Sequence: Synthetic polynucleotide
cagtccagttacgctggagtctgctaaggtgtatggagccgatgttggcccagaatgtccgccagaacttcgaattgctctattcgcgtcgcgagatgctgccgctggtgagtagtcaccgcacccgcatatttgaagcgattatggccggtaagccggaagaagcgcgcgaagcatcgcatcgccatctggcctttatcgaagaaattttgctcgacagaagtcgtgaagagagccgccgtgagcgttctctgcgtcgtctggagcaacgaaagaattagtgtttaaacataacttcgtatagcatacattatacgaagttattgttgacaattaatcatcggcatagtatatcggcatagtataatacgacaaggtgaggaactaaaccatggccaagttgaccagtgccgttccggtgctcaccgcgcgcgacgtcgccggagcggtcgagttctggaccgaccggctcgggttctcccgggacttcgtggaggacgacttcgccggtgtggtccgggacgacgtgaccctgttcatcagcgcggtccaggaccaggtggtgccggacaacaccctggcctgggtgtgggtgcgcggcctggacgagctgtacgccgagtggtcggaggtcgtgtccacgaacttccgggacgcctccgggccggccatgaccgagatcggcgagcagccgtgggggcgggagttcgccctgcgcgacccggccggcaactgcgtgcacttcgtggccgaggagcaggactgaataacttcgtatagcatacattatacgaagttatagatcttaactacttaaaaatttcagttgcttaatcctacaattcttgatataatattctcatagtttgaaagaactattcagatagataaggaataacccatgtcagaacgtttcccaaatgacgtggatccgatcgaaactcgcgactggctccaggcgatcgaatcggtcatccgtgaagaaggtgttgagcgtgctcagtatctgatcgaccaactgcttgctgaagcccgcaaaggcggtgtaaacgtagccgcaggcacaggtatcagcaactacatcaacaccatccccgttgaagaacaaccggagtatccgggtaatctggaactggaacgccgtattcgttcagctatccgctggaacgccatcatgacggactgaccatttaaatcatacctgacc

SEQ ID NO: 864 - DNA, 1290 bp, Artificial Sequence
  Description of Artificial Sequence: Synthetic polynucleotide
cagtccagttacgctggagtcgtaactgtctgcgtcatttttcatatcacattccttaagccaattttaatcctgctcaaatgaccgtctatgcttaaaaaacagccgtatcagcatcattactactgaagcaactgaattgtataagttaatttaatgttaagtagtgattcgtgccggggcgatgtctcgttttacccgaccgtcgaagacaattatcagtctttatccggcgttctaaggtgtttatcccactatcacggctgaatcgttaatattttgcgagttcacgccgaaatactgatttttggcgctagatcagtttaaacataacttcgtatagcatacattatacgaagttattgttgacaattaatcatcggcatagtatatcggcatagtataatacgacaaggtgaggaactaaaccatggccaagcctttgtctcaagaagaatccaccctcattgaaagagcaacggctacaatcaacagcatccccatctctgaagactacagcgtcgccagcgcagctctctctagcgacggccgcatcttcactggtgtcaatgtatatcattttactgggggaccttgtgcagaactcgtggtgctgggcactgctgctgctgcggcagctggcaacctgacttgtatcgtcgcgatcggaaatgagaacaggggcatcttgagcccctgcggacggtgccgacaggtgcttctcgatctgcatcctgggatcaaagccatagtgaaggacagtgatggacagccgacggcagttgggattcgtgaattgctgccctctggttatgtgtgggagggctaaataacttcgtatagcatacattatacgaagttatagatcttaactacttaaaaatttcagttgcttaatcctacaattcttgatataatattctcatagtttgaaagaactattcaaccgatggaagggaatatcatgcgaattggcataccaagagaacggttaaccaatgaaacccgtgttgcagcaacgccaaaaacagtggaacagctgctgaaactgggttttaccgtcgcggtagagagcggcgcgggtcaactggcaagttttgacgataaagcgtttgtgcaagcgggcgctgaaattgtagaagggaatagcgtctggcagtcagagatcattctgaaggtcaatgcgccgttagatgatgaaattgcgttactgaatcctgggacaacgctggtgagttttatctggcctgcgcagaatccggaaactgaccatttaaatcatacctgacc

SEQ ID NO: 865 - DNA, 1210 bp, Artificial Sequence
  Description of Artificial Sequence: Synthetic polynucleotide
cagtccagttacgctggagtcggcactataccagagaatgaacatactggattgctccagtattgtgaatgaacggtaacgcaataaaacatatttactgcaattctttggccggttcttttacgtacagcggaaacctgccgcttaaacggagagtatcgtcgataaaaatccaataaaacgtcagggcaaaagtaagaaacagacaaagcaaaggccgctcaggatatagccagataaatgacggggatcaattggcttacccgcgataaaatgttaccattctgttgcttttatgtatgtttaaacataacttcgtatagcatacattatacgaagttattgttgacaattaatcatcggcatagtatatcggcatagtataatacgacaaggtgaggaactaaaccatggccaagcctttgtctcaagaagaatccaccctcattgaaagagcaacggctacaatcaacagcatccccatctctgaagactacagcgtcgccagcgcagctctctctagcgacggccgcatcttcactggtgtcaatgtatatcattttactgggggaccttgtgcagaactcgtggtgctgggcactgctgctgctgcggcagctggcaacctgacttgtatcgtcgcgatcggaaatgagaacaggggcatcttgagcccctgcggacggtgccgacaggtgcttctcgatctgcatcctgggatcaaagccatagtgaaggacagtgatggacagccgacggcagttgggattcgtgaattgctgccctctggttatgtgtgggagggctaaataacttcgtatagcatacattatacgaagttatagatcttaactacttaaaaatttcagttgcttaatcctacaattcttgatataatattctcatagtttgaaagaactattcaagaacaggtaagccctaccatgccacattcctacgattacgatgccatagtaataggttccggccccggcggcgaaggcgctgcaatgggcctggttaagcaaggtgcgcgcgtcgcagttatcgagcgttatcaaaatgttggcggcggttgcacccactggggcaccatcccgtcgaaagctctccgtcacgccgtcagccgcattatagaattcaatcaaaacccactttacagcgaccattcccgactgctccgcactgaccatttaaatcatacctgacc

SEQ ID NO: 866 - DNA, 1216 bp, Artificial Sequence
  Description of Artificial Sequence: Synthetic polynucleotide
cagtccagttacgctggagtcctctctcgacatatcaattattttcttgccgtggctgaacatggcagcttcacccgtgccgccagtgcgttgcacgtctcccaacctgcgctttcccagcagattcgccagttagaggagagtttaggcgtgccgctgtttgaccgtagcgggcgaacgattcgtctcactgatgcaggagaagtctggcgacagtacgccagccgggcgttacaggaactgggggcgggtaaacgggtttaaactaccgttcgtataatgtatgctatacgaagttatgatatctactacgacactgcatgcatcatcagatcttgttgacaattaatcatcggcatagtatatcggcatagtataatacgacaaggtgaggaactaaaccatggccaagcctttgtctcaagaagaatccaccctcattgaaagagcaacggctacaatcaacagcatccccatctctgaagactacagcgtcgccagcgcagctctctctagcgacggccgcatcttcactggtgtcaatgtatatcattttactgggggaccttgtgcagaactcgtggtgctgggcactgctgctgctgcggcagctggcaacctgacttgtatcgtcgcgatcggaaatgagaacaggggcatcttgagcccctgcggacggtgccgacaggtgcttctcgatctgcatcctgggatcaaagccatagtgaaggacagtgatggacagccgacggcagttgggattcgtgaattgcataacttcgtataatgtatgctatacgaacggtaagatcttaactacttaaaaatttcagttgcttaatcctacaattcttgatataatattctcatagtttgaaagaactattcaaaattaaagaggtatatattaatgaaagagattattgatggattccttaaattccagcgcgaggcatttccgaagcgggaagccttgtttaaacagctggcgacacagcaaagcccgcgcacactttttatctcctgctccgacagccgtctggtccctgagctggtgacgcaacgtgagcctggcgatctgttcgttattcgcaacgcgggcaatatcgtcccttcctacgggccggaacccggtggcgtttctgcttcggtggagtatgccgtcgctgcgcttcgggtatctgacattgactgaccatttaaatcatacctgacc

SEQ ID NO: 867 - DNA, 2172 bp, Artificial Sequence
  Description of Artificial Sequence: Synthetic polynucleotide
atggcaggcgatcacgttctgccgccggtttgggcgaaccagattgtccgtttcgctaaccgctccctggaaggtctggagttcgcgtgcgcgtggaccgcacagctgctgcacagccaacgtcatattaacgaaattacgctgaacattccagccaatattagcgcgaccacgggcgcacgttccgccagcgtcggctgggccgagtccttgattggtctgcacctgggcaaggtggctctgattaccggtggttcggcgggcatcggtggtcaaatcggtcgtctgctggccttgtctggcgcgcgtgtgatgctggccgctcgcgatcgccataaattggaacagatgcaagccatgattcaaagcgaattggcggaggttggttataccgatgtggaggaccgtgtgcacatcgctccgggttgcgatgtgagcagcgaggcgcagctggcagatctggtggaacgtacgctgtccgcattcggtaccgtggattatttgattaataacgccggtattgcgggcgtggaggagatggtgatcgacatgccggtggaaggctggcgtcacaccctgtttgccaacctgatttcgaattattcgctgatgcgcaagttggcgccgctgatgaagaagcaaggtagcggttacatcctgaacgtttcttcctattttggcggtgagaaggacgcggcgattccttatccgaaccgcgccgactacgccgtctccaaggctggccaacgcgcgatggcggaagtgttcgctcgtttcctgggtccagagattcagatcaatgctattgccccaggtccggttgaaggcgaccgcctgcgtggtaccggtgagcgtccgggcctgtttgctcgtcgcgcccgtctgatcttggagaataaacgcctgaacgaattgcacgcggctttgattgctgcggcccgcaccgatgagcgctcgatgcacgagttggttgaattgttgctgccgaacgacgtggccgcgttggagcagaacccagcggcccctaccgcgctgcgtgagctggcacgccgcttccgtagcgaaggtgatccggcggcaagctcctcgtccgccttgctgaatcgctccatcgctgccaagctgttggctcgcttgcataacggtggctatgtgctgccggcggatatttttgcaaatctgcctaatccgccggacccgttctttacccgtgcgcaaattgaccgcgaagctcgcaaggtgcgtgatggtattatgggtatgctgtatctgcagcgtatgccaaccgagtttgacgtcgctatggcaaccgtgtactatctggccgatcgtaacgtgagcggcgaaactttccatccgtctggtggtttgcgctacgagcgtaccccgaccggtggcgagctgttcggcctgccatcgccggaacgtctggcggagctggttggtagcacggtgtacctgatcggtgaacacctgaccgagcacctgaacctgctggctcgtgcctatttggagcgctacggtgcccgtcaagtggtgatgattgttgagacggaaaccggtgcggaaaccatgcgtcgtctgttgcatgatcacgtcgaggcaggtcgcctgatgactattgtggcaggtgatcagattgaggcagcgattgaccaagcgatcacgcgctatggccgtccgggtccggtggtgtgcactccattccgtccactgccaaccgttccgctggtcggtcgtaaagactccgattggagcaccgttttgagcgaggcggaatttgcggaactgtgtgagcatcagctgacccaccatttccgtgttgctcgtaagatcgccttgtcggatggcgcgtcgctggcgttggttaccccggaaacgactgcgactagcaccacggagcaatttgctctggcgaacttcatcaagaccaccctgcacgcgttcaccgcgaccatcggtgttgagtcggagcgcaccgcgcaacgtattctgattaaccaggttgatctgacgcgccgcgcccgtgcggaagagccgcgtgacccgcacgagcgtcagcaggaattggaacgcttcattgaagccgttctgctggttaccgctccgctgcctcctgaggcagacacgcgctacgcaggccgtattcaccgcggtcgtgcgattaccgtc

SEQ ID NO: 868 - DNA, 2568 bp, Artificial Sequence
  Description of Artificial Sequence: Synthetic polynucleotide
atggctttgccgttggacccacgtgacccggccaccattgatgcggttttcgattggggcgcaggcgagaatacgggtggcatccatgcggcggtcattctgccggcaacctcccacgaaccggctccgtgcgtgattgaagtcgatgacgaacgcgtcctgaatttcctggccgatgaaattaccggcaccatcgttattgcgagccgtttggcgcgctattggcaatcccaacgcctgaccccgggtgcccgtgcccgcggtccgcgtgttatctttctgagcaacggtgccgatcaaaatggtaatgtttacggtcgtattcaatctgcggcgatcggtcaattgattcgcgtttggcgtcacgaggcggagttggactatcaacgtgcatccgccgcaggcgatcacgttctgccgccggtttgggcgaaccagattgtccgtttcgctaaccgctccctggaaggtctggagttcgcgtgcgcgtggaccgcacagctgctgcacagccaacgtcatattaacgaaattacgctgaacattccagccaatattagcgcgaccacgggcgcacgttccgccagcgtcggctgggccgagtccttgattggtctgcacctgggcaaggtggctctgattaccggtggttcggcgggcatcggtggtcaaatcggtcgtctgctggccttgtctggcgcgcgtgtgatgctggccgctcgcgatcgccataaattggaacagatgcaagccatgattcaaagcgaattggcggaggttggttataccgatgtggaggaccgtgtgcacatcgctccgggttgcgatgtgagcagcgaggcgcagctggcagatctggtggaacgtacgctgtccgcattcggtaccgtggattatttgattaataacgccggtattgcgggcgtggaggagatggtgatcgacatgccggtggaaggctggcgtcacaccctgtttgccaacctgatttcgaattattcgctgatgcgcaagttggcgccgctgatgaagaagcaaggtagcggttacatcctgaacgtttcttcctattttggcggtgagaaggacgcggcgattccttatccgaaccgcgccgactacgccgtctccaaggctggccaacgcgcgatggcggaagtgttcgctcgtttcctgggtccagagattcagatcaatgctattgccccaggtccggttgaaggcgaccgcctgcgtggtaccggtgagcgtccgggcctgtttgctcgtcgcgcccgtctgatcttggagaataaacgcctgaacgaattgcacgcggctttgattgctgcggcccgcaccgatgagcgctcgatgcacgagttggttgaattgttgctgccgaacgacgtggccgcgttggagcagaacccagcggcccctaccgcgctgcgtgagctggcacgccgcttccgtagcgaaggtgatccggcggcaagctcctcgtccgccttgctgaatcgctccatcgctgccaagctgttggctcgcttgcataacggtggctatgtgctgccggcggatatttttgcaaatctgcctaatccgccggacccgttctttacccgtgcgcaaattgaccgcgaagctcgcaaggtgcgtgatggtattatgggtatgctgtatctgcagcgtatgccaaccgagtttgacgtcgctatggcaaccgtgtactatctggccgatcgtaacgtgagcggcgaaactttccatccgtctggtggtttgcgctacgagcgtaccccgaccggtggcgagctgttcggcctgccatcgccggaacgtctggcggagctggttggtagcacggtgtacctgatcggtgaacacctgaccgagcacctgaacctgctggctcgtgcctatttggagcgctacggtgcccgtcaagtggtgatgattgttgagacggaaaccggtgcggaaaccatgcgtcgtctgttgcatgatcacgtcgaggcaggtcgcctgatgactattgtggcaggtgatcagattgaggcagcgattgaccaagcgatcacgcgctatggccgtccgggtccggtggtgtgcactccattccgtccactgccaaccgttccgctggtcggtcgtaaagactccgattggagcaccgttttgagcgaggcggaatttgcggaactgtgtgagcatcagctgacccaccatttccgtgttgctcgtaagatcgccttgtcggatggcgcgtcgctggcgttggttaccccggaaacgactgcgactagcaccacggagcaatttgctctggcgaacttcatcaagaccaccctgcacgcgttcaccgcgaccatcggtgttgagtcggagcgcaccgcgcaacgtattctgattaaccaggttgatctgacgcgccgcgcccgtgcggaagagccgcgtgacccgcacgagcgtcagcaggaattggaacgcttcattgaagccgttctgctggttaccgctccgctgcctcctgaggcagacacgcgctacgcaggccgtattcaccgcggtcgtgcgattaccgtc

SEQ ID NO: 869 - DNA, 3135 bp, Artificial Sequence
  Description of Artificial Sequence: Synthetic polynucleotide
atggcgctgaacgctttgtcccagctggctgcccgcgagctgggcgctcgtggcatccgcgttaacactattttcccaggtcctattgagtccgaccgcatccgtaccgtgtttcaacgtatggatcaactgaagggtcgcccggagggcgacaccgcccatcactttttgaacaccatgcgcctgtgccgcgcaaacgaccaaggcgctttggaacgccgctttccgtccgttggcgatgttgctgatgcggctgtgtttctggcttctgctgagagcgcggcactgtcgggtgagacgattgaggtcacccacggtatggaactgccggcgtgtagcgaaacctccttgttggcgcgtaccgatctgcgtaccatcgacgcgagcggtcgcactaccctgatttgcgctggcgatcaaattgaagaagttatggccctgacgggcatgctgcgtacgtgcggtagcgaagtgattatcggcttccgttctgcggctgccctggcgcaatttgagcaggcagtgaatgaatctcgccgtctggcaggtgcggatttcaccccgccgatcgctttgccgttggacccacgtgacccggccaccattgatgcggttttcgattggggcgcaggcgagaatacgggtggcatccatgcggcggtcattctgccggcaacctcccacgaaccggctccgtgcgtgattgaagtcgatgacgaacgcgtcctgaatttcctggccgatgaaattaccggcaccatcgttattgcgagccgtttggcgcgctattggcaatcccaacgcctgaccccgggtgcccgtgcccgcggtccgcgtgttatctttctgagcaacggtgccgatcaaaatggtaatgtttacggtcgtattcaatctgcggcgatcggtcaattgattcgcgtttggcgtcacgaggcggagttggactatcaacgtgcatccgccgcaggcgatcacgttctgccgccggtttgggcgaaccagattgtccgtttcgctaaccgctccctggaaggtctggagttcgcgtgcgcgtggaccgcacagctgctgcacagccaacgtcatattaacgaaattacgctgaacattccagccaatattagcgcgaccacgggcgcacgttccgccagcgtcggctgggccgagtccttgattggtctgcacctgggcaaggtggctctgattaccggtggttcggcgggcatcggtggtcaaatcggtcgtctgctggccttgtctggcgcgcgtgtgatgctggccgctcgcgatcgccataaattggaacagatgcaagccatgattcaaagcgaattggcggaggttggttataccgatgtggaggaccgtgtgcacatcgctccgggttgcgatgtgagcagcgaggcgcagctggcagatctggtggaacgtacgctgtccgcattcggtaccgtggattatttgattaataacgccggtattgcgggcgtggaggagatggtgatcgacatgccggtggaaggctggcgtcacaccctgtttgccaacctgatttcgaattattcgctgatgcgcaagttggcgccgctgatgaagaagcaaggtagcggttacatcctgaacgtttcttcctattttggcggtgagaaggacgcggcgattccttatccgaaccgcgccgactacgccgtctccaaggctggccaacgcgcgatggcggaagtgttcgctcgtttcctgggtccagagattcagatcaatgctattgccccaggtccggttgaaggcgaccgcctgcgtggtaccggtgagcgtccgggcctgtttgctcgtcgcgcccgtctgatcttggagaataaacgcctgaacgaattgcacgcggctttgattgctgcggcccgcaccgatgagcgctcgatgcacgagttggttgaattgttgctgccgaacgacgtggccgcgttggagcagaacccagcggcccctaccgcgctgcgtgagctggcacgccgcttccgtagcgaaggtgatccggcggcaagctcctcgtccgccttgctgaatcgctccatcgctgccaagctgttggctcgcttgcataacggtggctatgtgctgccggcggatatttttgcaaatctgcctaatccgccggacccgttctttacccgtgcgcaaattgaccgcgaagctcgcaaggtgcgtgatggtattatgggtatgctgtatctgcagcgtatgccaaccgagtttgacgtcgctatggcaaccgtgtactatctggccgatcgtaacgtgagcggcgaaactttccatccgtctggtggtttgcgctacgagcgtaccccgaccggtggcgagctgttcggcctgccatcgccggaacgtctggcggagctggttggtagcacggtgtacctgatcggtgaacacctgaccgagcacctgaacctgctggctcgtgcctatttggagcgctacggtgcccgtcaagtggtgatgattgttgagacggaaaccggtgcggaaaccatgcgtcgtctgttgcatgatcacgtcgaggcaggtcgcctgatgactattgtggcaggtgatcagattgaggcagcgattgaccaagcgatcacgcgctatggccgtccgggtccggtggtgtgcactccattccgtccactgccaaccgttccgctggtcggtcgtaaagactccgattggagcaccgttttgagcgaggcggaatttgcggaactgtgtgagcatcagctgacccaccatttccgtgttgctcgtaagatcgccttgtcggatggcgcgtcgctggcgttggttaccccggaaacgactgcgactagcaccacggagcaatttgctctggcgaacttcatcaagaccaccctgcacgcgttcaccgcgaccatcggtgttgagtcggagcgcaccgcgcaacgtattctgattaaccaggttgatctgacgcgccgcgcccgtgcggaagagccgcgtgacccgcacgagcgtcagcaggaattggaacgcttcattgaagccgttctgctggttaccgctccgctgcctcctgaggcagacacgcgctacgcaggccgtattcaccgcggtcgtgcgattaccgtc

SEQ ID NO: 870 - protein, 1217 aa, Erythrobacter sp.; identical to SEQ ID NO: 788
  Erythrobacter sp. NAP1

SEQ ID NO: 871 - DNA, 7999 bp, Artificial Sequence
  Description of Artificial Sequence: Synthetic polynucleotide
gtttgacagcttatcatcgactgcacggtgcaccaatgcttctggcgtcaggcagccatcggaagctgtggtatggctgtgcaggtcgtaaatcactgcataattcgtgtcgctcaaggcgcactcccgttctggataatgttttttgcgccgacatcataacggttctggcaaatattctgaaatgagctgttgacaattaatcatccggctcgtataatgtgtggaattgtgagcggataacaatttcacacaggaaacagcgccgctgagaaaaagcgaagcggcactgctctttaacaatttatcagacaatctgtgtgggcactcgaccggaattatcgattaactttattattaaaaattaaagaggtatatattaatgtatcgattaaataaggaggaataaaccatgagcaaagaaggtaatgcggccaaaggccgcctggagggtaaagtggccctgatcaccggtgcagctggcaacctgggtaatgaaattagccgcgcgtttgcccgtgagggtgcgttcgtggttatgaccggccgcacggaagaacgtatctctgcggcccgcgaacagctgattgcggataccggtgtcgccccggaacgtatcgacacggcggtgctggatggcggtaacccggactctattcgtgcagctatggccaaactgcgcaaagaatatggccgtattgatatcctgattaacaatgcaggttcagcaggtccgaaacagccgctgcataatgttccgctgtcgccgcaagaaatggaagcatgcggtgataccgaaacggtgcgcgacgcgatgctgaacatcctgggcgtgacctggaatatggctcgtattgttgcgccgatgatgccggtgggcggtgcaatggttaatatcagcaccatttttagccacacgcgctattacggccgtaccgcgtatgtcgtgccgaaagcggccctgaacgcactgagcaatcagctggcttctgaactgggcccgcgtggtattcgcgttaacaccgtctttccgggtccgatcgaaagtgatcgtattcgcacggtgttcgcagctatggatgaagttcagtcccaaccgaaagacaccacggcgaattactttaccggtcgtatggcactgacgcgtagcgtcaacggcaaagtggatggtaaaccgctgccgaatccgaaagacatcgcgggtacctgtctgttcctggccagtgaagaagcggccggcattgccggtgaagaagttgatgtcacccatggcctgtccgcaaaccgcacgtctgctagtacctatatgacgcgcccgtctatgcgtagtctggatggcgcgggtctgaacatcttcatcgtttcaggtgaaaactgggatgacgccctggtcgcagctcacaccctgatcggctcgggtgcaaaagtgcgcctgggcctggcacgtaacgctgatgttgcacaggctaatgcgcgtctgaaagcgcaaggcattggtgaagaactgaccgttacgcgttttaatcgcgccgaaccggacgcaatggaagatgctctggcggccttcagtggcgacgttgatggtgcgatcaccggcgccattatcctgccggtcaaaccgagcggtcattttacgggctctctgctggcagctgatgacgataccgtgacgaaattcatggataccgaactggtcggtgccattgcagtgtcccgttcactggcacgttactggcacggtcgtgaagatttgcagagcccgccgcgttgcgtttttatgaccaacccgggtgacccgctgggcaattccttcgcgtcagtgctgtcggccggtatcacgcagctgatccgtatttggcgcgatgaagaacgcgttcaagcaggcaacggtagtaccgaacatgcggtctggtccaatcagattgtgcgccacaccaacacggaagatgaaaatacccgttttgcaagcggccatgctacgcgcgtgctgttccgtgaacaacacatcgccgaaattgatctgaaactgccggcaaacatcagtgaagaaaccggttcccgcaaagcaatggtgggctttgctgaaaatattaccggtctgcatctgggcaaagttgcattcatcacgggcggtagtgctggtattggcggtcaggtggcacgtctgctggctctggcaggtgccaaagtgatgatggttgcacgtcgcgaatccgaactggtcgcggcacgtgatcgcatcgtgggtgaactgcaagacattggctttgcgggtgttgaacgtcgcgtcaaatatatggcggacattgatgtcagtgattttgcctccctggacaaagcggtggatgccaccctggaagaattcggccgtatcgactacctgattaacaatgcgggcgttgcaggtgctgaagacatggtcatcgatatggaaccggaagcctggcgcttcaccctggatgcaaacctgattagcaattatcatctgatgcagcgtgttgtcccgctgatgaaagaacaaggctctggttatgtcctgaacgtgagctcttactttggcggtgaaaaattcctggcggttgcctatccgaatcgcgccgattacggtctgagcaaagcgggccagcgtgccatggtggaagcattttctccgttcctgggcccggaagttcaatgcaacgcaattgctccgggtccggtcgacggtgatcgtctgtctggtaccggcggtaaaccgggcctgtttcagcgtcgcgcgaaactgatcctggaaaacaaacgcctgaatgctgtgtatagtgcggttatccatgccattcgtgaaggcggtgatgcagctaaaattctgacccgtctgagtcgcaattcgaccagcacgctgtcccacgatgcagaagcaccggaagaactgcgtaaactggcactggattttgctagccagggcgacggtctgtgtacctgggatcaatacctgctgacggacgcaatggctcagcgtctgctggtgcgtctgcaactgggcggttttctgctgggttcaaacgaatgggcctcgctgagttcctcagaacagacctggctgaaactgtcaccgccggacgataaaccgttcctgccggcggcccaagttgataaagtcgcgaatggcgtcggtaaaggcgtgatttcgcagctgcatctgggtgcaatgccgaccgaagccgaagttgcgcaagccacggtctttttcctggcagatcgcgctgtgtcaggtgaaacctttatgccgtcgggcggtctgcgtgttgaacgctcaaacaccgaacgcgaaatgttcggctcgccgaaacaggaacgtatcgataaaatgaaaggtaaaaccgtctggattatcggcgaacacctgagtgactatgtggcagctacgatcgaagaactggtgtccggttgcggcgttgcgaaagtggttctgattgccaaagataaaagcggtgaaaaagcggttcgtgaccagctgccgaatgacctgtctaaagatgcactggaagtgctgatcgctggtgatggcctggaagaagcgatggacgaagccctgggccattggggtaaaccgaccacggtgctgtcaatgccgggcgaaccgctgccggatcacctgtttgaaggcggtaacccgctgtcgaccaaagacttcgcacatatggtggaagctaatattacccgtcactatcgcgttacgcgtaaagcgtccctgtacgatggttgtcaggtcgtgctggttagcccggatgtcccgtacggttctgacggtccgggtgttgcactggctaactttgtcaaaacctctctgcatgcgttcaccgccacggtggcagttgaaaatgaacgcctggttcacgatgtcccggtgaaccagatcaatctgacgcgtcgcgtgtcgagcgaagaaccgcgtgacgcagatgaacatgctgaagaactgcgtcgctttacccgtgcagtgctgctggttggtgcaccgctgccggacgcacaggattcacgttatcgctcgaaaatttaccgcggcaccagcatgacggtgtaataaccgcggcacgagcatgacggtccatcaccatcatcactaatagagatctgcagctggtaccatatgggaattcgaagcttggctgttttggcggatgagagaagattttcagcctgatacagattaaatcagaacgcagaagcggtctgataaaacagaatttgcctggcggcagtagcgcggtggtcccacctgaccccatgccgaactcagaagtgaaacgccgtagcgccgatggtagtgtggggtctccccatgcgagagtagggaactgccaggcatcaaataaaacgaaaggctcagtcgaaagactgggcctttcgttttatctgttgtttgtcggtgaacgctctcctgagtaggacaaatccgccgggagcggatttgaacgttgcgaagcaacggcccggagggtggcgggcaggacgcccgccataaactgccaggcatcaaattaagcagaaggccatcctgacggatggcctttttgcgtttctacaaactctttttgtttatttttctaaatacattcaaatatgtatccgctcatgagacaataaccctgataaatgcttcaataatattgaaaaaggaagagtatgagtattcaacatttccgtgtcgcccttattcccttttttgcggcattttgccttcctgtttttgctcacccagaaacgctggtgaaagtaaaagatgctgaagatcagttgggtgcacgagtgggttacatcgaactggatctcaacagcggtaagatccttgagagttttcgccccgaagaacgttttccaatgatgagcacttttaaagttctgctatgtggcgcggtattatcccgtgttgacgccgggcaagagcaactcggtcgccgcatacactattctcagaatgacttggttgagtactcaccagtcacagaaaagcatcttacggatggcatgacagtaagagaattatgcagtgctgccataaccatgagtgataacactgcggccaacttacttctgacaacgatcggaggaccgaaggagctaaccgcttttttgcacaacatgggggatcatgtaactcgccttgatcgttgggaaccggagctgaatgaagccataccaaacgacgagcgtgacaccacgatgcctgtagcaatggcaacaacgttgcgcaaactattaactggcgaactacttactctagcttcccggcaacaattaatagactggatggaggcggataaagttgcaggaccacttctgcgctcggcccttccggctggctggtttattgctgataaatctggagccggtgagcgtgggtctcgcggtatcattgcagcactggggccagatggtaagccctcccgtatcgtagttatctacacgacggggagtcaggcaactatggatgaacgaaatagacagatcgctgagataggtgcctcactgattaagcattggtaactgtcagaccaagtttactcatatatactttagattgatttaaaacttcatttttaatttaaaaggatctaggtgaagatcctttttgataatctcatgaccaaaatcccttaacgtgagttttcgttccactgagcgtcagaccccgtagaaaagatcaaaggatcttcttgagatcctttttttctgcgcgtaatctgctgcttgcaaacaaaaaaaccaccgctaccagcggtggtttgtttgccggatcaagagctaccaactctttttccgaaggtaactggcttcagcagagcgcagataccaaatactgtccttctagtgtagccgtagttaggccaccacttcaagaactctgtagcaccgcctacatacctcgctctgctaatcctgttaccagtggctgctgccagtggcgataagtcgtgtcttaccgggttggactcaagacgatagttaccggataaggcgcagcggtcgggctgaacggggggttcgtgcacacagcccagcttggagcgaacgacctacaccgaactgagatacctacagcgtgagctatgagaaagcgccacgcttcccgaagggagaaaggcggacaggtatccggtaagcggcagggtcggaacaggagagcgcacgagggagcttccagggggaaacgcctggtatctttatagtcctgtcgggtttcgccacctctgacttgagcgtcgatttttgtgatgctcgtcaggggggcggagcctatggaaaaacgccagcaacgcggcctttttacggttcctggccttttgctggccttttgctcacatgttctttcctgcgttatcccctgattctgtggataaccgtattaccgcctttgagtgagctgataccgctcgccgcagccgaacgaccgagcgcagcgagtcagtgagcgaggaagcggaagagcgcctgatgcggtattttctccttacgcatctgtgcggtatttcacaccgcatatggtgcactctcagtacaatctgctctgatgccgcatagttaagccagtatacactccgctatcgctacgtgactgggtcatggctgcgccccgacacccgccaacacccgctgacgcgccctgacgggcttgtctgctcccggcatccgcttacagacaagctgtgaccgtctccgggagctgcatgtgtcagaggttttcaccgtcatcaccgaaacgcgcgaggcagcagatcaattcgcgcgcgaaggcgaagcggcatgcatttacgttgacaccatcgaatggtgcaaaacctttcgcggtatggcatgatagcgcccggaagagagtcaattcagggtggtgaatgtgaaaccagtaacgttatacgatgtcgcagagtatgccggtgtctcttatcagaccgtttcccgcgtggtgaaccaggccagccacgtttctgcgaaaacgcgggaaaaagtggaagcggcgatggcggagctgaattacattcccaaccgcgtggcacaacaactggcgggcaaacagtcgttgctgattggcgttgccacctccagtctggccctgcacgcgccgtcgcaaattgtcgcggcgattaaatctcgcgccgatcaactgggtgccagcgtggtggtgtcgatggtagaacgaagcggcgtcgaagcctgtaaagcggcggtgcacaatcttctcgcgcaacgcgtcagtgggctgatcattaactatccgctggatgaccaggatgccattgctgtggaagctgcctgcactaatgttccggcgttatttcttgatgtctctgaccagacacccatcaacagtattattttctcccatgaagacggtacgcgactgggcgtggagcatctggtcgcattgggtcaccagcaaatcgcgctgttagcgggcccattaagttctgtctcggcgcgtctgcgtctggctggctggcataaatatctcactcgcaatcaaattcagccgatagcggaacgggaaggcgactggagtgccatgtccggttttcaacaaaccatgcaaatgctgaatgagggcatcgttcccactgcgatgctggttgccaacgatcagatggcgctgggcgcaatgcgcgccattaccgagtccgggctgcgcgttggtgcggatatctcggtagtgggatacgacgataccgaagacagctcatgttatatcccgccgtcaaccaccatcaaacaggattttcgcctgctggggcaaaccagcgtggaccgcttgctgcaactctctcagggccaggcggtgaagggcaatcagctgttgcccgtctcactggtgaaaagaaaaaccaccctggcgcccaatacgcaaaccgcctctccccgcgcgttggccgattcattaatgcagctggcacgacaggtttcccgactggaaagcgggcagtgagcgcaacgcaattaatgtgagttagcgcgaattgatctg

SEQ ID NO: 872 - DNA, 7837 bp, Artificial Sequence
  Description of Artificial Sequence: Synthetic polynucleotide
catggctttgccgttggacccacgtgacccggccaccattgatgcggttttcgattggggcgcaggcgagaatacgggtggcatccatgcggcggtcattctgccggcaacctcccacgaaccggctccgtgcgtgattgaagtcgatgacgaacgcgtcctgaatttcctggccgatgaaattaccggcaccatcgttattgcgagccgtttggcgcgctattggcaatcccaacgcctgaccccgggtgcccgtgcccgcggtccgcgtgttatctttctgagcaacggtgccgatcaaaatggtaatgtttacggtcgtattcaatctgcggcgatcggtcaattgattcgcgtttggcgtcacgaggcggagttggactatcaacgtgcatccgccgcaggcgatcacgttctgccgccggtttgggcgaaccagattgtccgtttcgctaaccgctccctggaaggtctggagttcgcgtgcgcgtggaccgcacagctgctgcacagccaacgtcatattaacgaaattacgctgaacattccagccaatattagcgcgaccacgggcgcacgttccgccagcgtcggctgggccgagtccttgattggtctgcacctgggcaaggtggctctgattaccggtggttcggcgggcatcggtggtcaaatcggtcgtctgctggccttgtctggcgcgcgtgtgatgctggccgctcgcgatcgccataaattggaacagatgcaagccatgattcaaagcgaattggcggaggttggttataccgatgtggaggaccgtgtgcacatcgctccgggttgcgatgtgagcagcgaggcgcagctggcagatctggtggaacgtacgctgtccgcattcggtaccgtggattatttgattaataacgccggtattgcgggcgtggaggagatggtgatcgacatgccggtggaaggctggcgtcacaccctgtttgccaacctgatttcgaattattcgctgatgcgcaagttggcgccgctgatgaagaagcaaggtagcggttacatcctgaacgtttcttcctattttggcggtgagaaggacgcggcgattccttatccgaaccgcgccgactacgccgtctccaaggctggccaacgcgcgatggcggaagtgttcgctcgtttcctgggtccagagattcagatcaatgctattgccccaggtccggttgaaggcgaccgcctgcgtggtaccggtgagcgtccgggcctgtttgctcgtcgcgcccgtctgatcttggagaataaacgcctgaacgaattgcacgcggctttgattgctgcggcccgcaccgatgagcgctcgatgcacgagttggttgaattgttgctgccgaacgacgtggccgcgttggagcagaacccagcggcccctaccgcgctgcgtgagctggcacgccgcttccgtagcgaaggtgatccggcggcaagctcctcgtccgccttgctgaatcgctccatcgctgccaagctgttggctcgcttgcataacggtggctatgtgctgccggcggatatttttgcaaatctgcctaatccgccggacccgttctttacccgtgcgcaaattgaccgcgaagctcgcaaggtgcgtgatggtattatgggtatgctgtatctgcagcgtatgccaaccgagtttgacgtcgctatggcaaccgtgtactatctggccgatcgtaacgtgagcggcgaaactttccatccgtctggtggtttgcgctacgagcgtaccccgaccggtggcgagctgttcggcctgccatcgccggaacgtctggcggagctggttggtagcacggtgtacctgatcggtgaacacctgaccgagcacctgaacctgctggctcgtgcctatttggagcgctacggtgcccgtcaagtggtgatgattgttgagacggaaaccggtgcggaaaccatgcgtcgtctgttgcatgatcacgtcgaggcaggtcgcctgatgactattgtggcaggtgatcagattgaggcagcgattgaccaagcgatcacgcgctatggccgtccgggtccggtggtgtgcactccattccgtccactgccaaccgttccgctggtcggtcgtaaagactccgattggagcaccgttttgagcgaggcggaatttgcggaactgtgtgagcatcagctgacccaccatttccgtgttgctcgtaagatcgccttgtcggatggcgcgtcgctggcgttggttaccccggaaacgactgcgactagcaccacggagcaatttgctctggcgaacttcatcaagaccaccctgcacgcgttcaccgcgaccatcggtgttgagtcggagcgcaccgcgcaacgtattctgattaaccaggttgatctgacgcgccgcgcccgtgcggaagagccgcgtgacccgcacgagcgtcagcaggaattggaacgcttcattgaagccgttctgctggttaccgctccgctgcctcctgaggcagacacgcgctacgcaggccgtattcaccgcggtcgtgcgattaccgtctaatagaagcttggctgttttggcggatgagagaagattttcagcctgatacagattaaatcagaacgcagaagcggtctgataaaacagaatttgcctggcggcagtagcgcggtggtcccacctgaccccatgccgaactcagaagtgaaacgccgtagcgccgatggtagtgtggggtctccccatctgtggtatggctgtgcaggtcgtaaatcactgcataattcgtgtcgctcaaggcgcactcccgttctggataatgttttttgcgccgacatcataacggttctggcaaatattctgaaatgagctgttgacaattaatcatccggctcgtataatgtgtggaattgtgagcggataacaatttcacacaggaaacagcgccgctgagaaaaagcgaagcggcactgctctttaacaatttatcagacaatctgtgtgggcactcgaccggaattatcgattaactttattattaaaaattaaagaggtatatattaatgtatcgattaaataaggaggaataaaccatggtcgttttagtaactggagcaacggcaggttttggtgaatgcattactcgtcgttttattcaacaagggcataaagttatcgccactggccgtcgccaggaacggttgcaggagttaaaagacgaactgggagataatctgtatatcgcccaactggacgttcgcaaccgcgccgctattgaagagatgctggcatcgcttcctgccgagtggtgcaatattgatatcctggtaaataatgccggcctggcgttgggcatggagcctgcgcataaagccagcgttgaagactgggaaacgatgattgataccaacaacaaaggcctggtatatatgacgcgcgccgtcttaccgggtatggttgaacgtaatcatggtcatattattaacattggctcaacggcaggtagctggccgtatgccggtggtaacgtttacggtgcgacgaaagcgtttgttcgtcagtttagcctgaatctgcgtacggatctgcatggtacggcggtgcgcgtcaccgacatcgaaccgggtctggtgggtggtaccgagttttccaatgtccgctttaaaggcgatgacggtaaagcagaaaaaacctatcaaaataccgttgcattgacgccagaagatgtcagcgaagccgtctggtgggtgtcaacgctgcctgctcacgtcaatatcaataccctggaaatgatgccggttacccaaagctatgccggactgaatgtccaccgtcagtaaggaggcggtatcattgcagcactggggccagatggtaagccctcccgtatcgtagttatctacacgacgggattagaaaaactcatcgagcatcaaatgaaactgcaatttattcatatcaggattatcaataccatatttttgaaaaagccgtttctgtaatgaaggagaaaactcaccgaggcagttccataggatggcaagatcctggtatcggtctgcgattccgactcgtccaacatcaatacaacctattaatttcccctcgtcaaaaataaggttatcaagtgagaaatcaccatgagtgacgactgaatccggtgagaatggcaaaagcttatgcatttctttccagacttgttcaacaggccagccattacgctcgtcatcaaaatcactcgcatcaaccaaaccgttattcattcgtgattgcgcctgagcgagacgaaatacgcgatcgctgttaaaaggacaattacaaacaggaatcgaatgcaaccggcgcaggaacactgccagcgcatcaacaatattttcacctgaatcaggatattcttctaatacctggaatgctgttttcccggggatcgcagtggtgagtaaccatgcatcatcaggagtacggataaaatgcttgatggtcggaagaggcataaattccgtcagccagtttagtctgaccatctcatctgtaacatcattggcaacgctacctttgccatgtttcagaaacaactctggcgcatcgggcttcccatacaatcgatagattgtcgcacctgattgcccgacattatcgcgagcccatttatacccatataaatcagcatccatgttggaatttaatcgcggcctcgagcaagacgtttcccgttgaatatggctcataacaccccttgtattactgtttatgtaagcagacagttttattgttcatgatgatatatttttatcttgtgcaatgtaacatcagagattttgagacacaacgtggctttgttgaataaatcgaacttttgctgagttgaagggagtcaggcaactatggatgaacgaaatagacagatcgctgagataggtgcctcactgattaagcattggtaactgtcagaccaagtttactcatatatactttagattgatttaaaacttcatttttaatttaaaaggatctaggtgaagatcctttttgataatctcatgaccaaaatcccttaacgtgagttttcgttccactgagcgtcagaccccgtagaaaagatcaaaggatcttcttgagatcctttttttctgcgcgtaatctgctgcttgcaaacaaaaaaaccaccgctaccagcggtggtttgtttgccggatcaagagctaccaactctttttccgaaggtaactggcttcagcagagcgcagataccaaatactgtccttctagtgtagccgtagttaggccaccacttcaagaactctgtagcaccgcctacatacctcgctctgctaatcctgttaccagtggctgctgccagtggcgataagtcgtgtcttaccgggttggactcaagacgatagttaccggataaggcgcagcggtcgggctgaacggggggttcgtgcacacagcccagcttggagcgaacgacctacaccgaactgagatacctacagcgtgagctatgagaaagcgccacgcttcccgaagggagaaaggcggacaggtatccggtaagcggcagggtcggaacaggagagcgcacgagggagcttccagggggaaacgcctggtatctttatagtcctgtcgggtttcgccacctctgacttgagcgtcgatttttgtgatgctcgtcaggggggcggagcctatggaaaaacgccagcaacgcggcctttttacggttcctggccttttgctggccttttgctcacatgttctttcctgcgttatcccctgattctgtggataaccgtattaccgcctttgagtgagctgataccgctcgccgcagccgaacgaccgagcgcagcgagtcagtgagcgaggaagcggaagagcgcctgatgcggtattttctccttacgcatctgtgcggtatttcacaccgcatatggtgcactctcagtacaatctgctctgatgccgcatagttaagccagtatacactccgctatcgctacgtgactgggtcatggctgcgccccgacacccgccaacacccgctgacgcgccctgacgggcttgtctgctcccggcatccgcttacagacaagctgtgaccgtctccgggagctgcatgtgtcagaggttttcaccgtcatcaccgaaacgcgcgaggcagcagatcaattcgcgcgcgaaggcgaagcggcatgcatttacgttgacaccatcgaatggtgcaaaacctttcgcggtatggcatgatagcgcccggaagagagtcaattcagggtggtgaatgtgaaaccagtaacgttatacgatgtcgcagagtatgccggtgtctcttatcagaccgtttcccgcgtggtgaaccaggccagccacgtttctgcgaaaacgcgggaaaaagtggaagcggcgatggcggagctgaattacattcccaaccgcgtggcacaacaactggcgggcaaacagtcgttgctgattggcgttgccacctccagtctggccctgcacgcgccgtcgcaaattgtcgcggcgattaaatctcgcgccgatcaactgggtgccagcgtggtggtgtcgatggtagaacgaagcggcgtcgaagcctgtaaagcggcggtgcacaatcttctcgcgcaacgcgtcagtgggctgatcattaactatccgctggatgaccaggatgccattgctgtggaagctgcctgcactaatgttccggcgttatttcttgatgtctctgaccagacacccatcaacagtattattttctcccatgaagacggtacgcgactgggcgtggagcatctggtcgcattgggtcaccagcaaatcgcgctgttagcgggcccattaagttctgtctcggcgcgtctgcgtctggctggctggcataaatatctcactcgcaatcaaattcagccgatagcggaacgggaaggcgactggagtgccatgtccggttttcaacaaaccatgcaaatgctgaatgagggcatcgttcccactgcgatgctggttgccaacgatcagatggcgctgggcgcaatgcgcgccattaccgagtccgggctgcgcgttggtgcggatatctcggtagtgggatacgacgataccgaagacagctcatgttatatcccgccgtcaaccaccatcaaacaggattttcgcctgctggggcaaaccagcgtggaccgcttgctgcaactctctcagggccaggcggtgaagggcaatcagctgttgcccgtctcactggtgaaaagaaaaaccaccctggcgcccaatacgcaaaccgcctctccccgcgcgttggccgattcattaatgcagctggcacgacaggtttcccgactggaaagcgggcagtgagcgcaacgcaattaatgtgagttagcgcgaattgatctggtttgacagcttatcatcgactgcacggtgcaccaatgcttctggcgtcaggcagccatcggaagctgtggtatggctgtgcaggtcgtaaatcactgcataattcgtgtcgctcaaggcgcactcccgttctggataatgttttttgcgccgacatcataacggttctggcaaatattctgaaatgagctgttgacaattaatcatccggctcgtataatgtgtggaattgtgagcggataacaatttcacacaggaaacagcgccgctgagaaaaagcgaagcggcactgctctttaacaatttatcagacaatctgtgtgggcactcgaccggaattatcgattaactttattattaaaaattaaagaggtatatattaatgtatcgattaaataaggaggaataaac

SEQ ID NO: 873 - DNA, 7946 bp, Artificial Sequence
  Description of Artificial Sequence: Synthetic polynucleotide
gtttgacagcttatcatcgactgcacggtgcaccaatgcttctggcgtcaggcagccatcggaagctgtggtatggctgtgcaggtcgtaaatcactgcataattcgtgtcgctcaaggcgcactcccgttctggataatgttttttgcgccgacatcataacggttctggcaaatattctgaaatgagctgttgacaattaatcatccggctcgtataatgtgtggaattgtgagcggataacaatttcacacaggaaacagcgccgctgagaaaaagcgaagcggcactgctctttaacaatttatcagacaatctgtgtgggcactcgaccggaattatcgattaactttattattaaaaattaaagaggtatatattaatgtatcgattaaataaggaggaataaaccatggtcgttttagtaactggagcaacggcaggttttggtgaatgcattactcgtcgttttattcaacaagggcataaagttatcgccactggccgtcgccaggaacggttgcaggagttaaaagacgaactgggagataatctgtatatcgcccaactggacgttcgcaaccgcgccgctattgaagagatgctggcatcgcttcctgccgagtggtgcaatattgatatcctggtaaataatgccggcctggcgttgggcatggagcctgcgcataaagccagcgttgaagactgggaaacgatgattgataccaacaacaaaggcctggtatatatgacgcgcgccgtcttaccgggtatggttgaacgtaatcatggtcatattattaacattggctcaacggcaggtagctggccgtatgccggtggtaacgtttacggtgcgacgaaagcgtttgttcgtcagtttagcctgaatctgcgtacggatctgcatggtacggcggtgcgcgtcaccgacatcgaaccgggtctggtgggtggtaccgagttttccaatgtccgctttaaaggcgatgacggtaaagcagaaaaaacctatcaaaataccgttgcattgacgccagaagatgtcagcgaagccgtctggtgggtgtcaacgctgcctgctcacgtcaatatcaataccctggaaatgatgccggttacccaaagctatgccggactgaatgtccaccgtcagtaaattaaagaggtggatccgagatctcggtagtgggatacgacgataccgaagacagctcatgttatatcccgccgtcaaccaccatcaaacaggattttcgcctgctggggcaaaccagcgtggaccgcttgctgcaactctctcagggccaggcggtgaagggcaatcagctgttgcccgtctcactggtgaaaagaaaaaccaccctggcgcccaatacgcaaaccgcctctccccgcgcgttggccgattcattaatgcagctggcacgacaggtttcccgactggaaagcgggcagtgagcgcaacgcaattaatgtgagttagcgcgaattgatctggtttgacagcttatcatcgactgcacggtgcaccaatgcttctggcgtcaggcagccatcggaagctgtggtatggctgtgcaggtcgtaaatcactgcataattcgtgtcgctcaaggcgcactcccgttctggataatgttttttgcgccgacatcataacggttctggcaaatattctgaaatgagctgttgacaattaatcatccggctcgtataatgtgtggaattgtgagcggataacaatttcacacaggaaacagcgccgctgagaaaaagcgaagcggcactgctctttaacaatttatcagacaatctgtgtgggcactcgaccggaattatcgattaactttattattaaaaattaaagaggtatatattaatgtatcgattaaataaggaggaataaaccatggcaggcgatcacgttctgccgccggtttgggcgaaccagattgtccgtttcgctaaccgctccctggaaggtctggagttcgcgtgcgcgtggaccgcacagctgctgcacagccaacgtcatattaacgaaattacgctgaacattccagccaatattagcgcgaccacgggcgcacgttccgccagcgtcggctgggccgagtccttgattggtctgcacctgggcaaggtggctctgattaccggtggttcggcgggcatcggtggtcaaatcggtcgtctgctggccttgtctggcgcgcgtgtgatgctggccgctcgcgatcgccataaattggaacagatgcaagccatgattcaaagcgaattggcggaggttggttataccgatgtggaggaccgtgtgcacatcgctccgggttgcgatgtgagcagcgaggcgcagctggcagatctggtggaacgtacgctgtccgcattcggtaccgtggattatttgattaataacgccggtattgcgggcgtggaggagatggtgatcgacatgccggtggaaggctggcgtcacaccctgtttgccaacctgatttcgaattattcgctgatgcgcaagttggcgccgctgatgaagaagcaaggtagcggttacatcctgaacgtttcttcctattttggcggtgagaaggacgcggcgattccttatccgaaccgcgccgactacgccgtctccaaggctggccaacgcgcgatggcggaagtgttcgctcgtttcctgggtccagagattcagatcaatgctattgccccaggtccggttgaaggcgaccgcctgcgtggtaccggtgagcgtccgggcctgtttgctcgtcgcgcccgtctgatcttggagaataaacgcctgaacgaattgcacgcggctttgattgctgcggcccgcaccgatgagcgctcgatgcacgagttggttgaattgttgctgccgaacgacgtggccgcgttggagcagaacccagcggcccctaccgcgctgcgtgagctggcacgccgcttccgtagcgaaggtgatccggcggcaagctcctcgtccgccttgctgaatcgctccatcgctgccaagctgttggctcgcttgcataacggtggctatgtgctgccggcggatatttttgcaaatctgcctaatccgccggacccgttctttacccgtgcgcaaattgaccgcgaagctcgcaaggtgcgtgatggtattatgggtatgctgtatctgcagcgtatgccaaccgagtttgacgtcgctatggcaaccgtgtactatctggccgatcgtaacgtgagcggcgaaactttccatccgtctggtggtttgcgctacgagcgtaccccgaccggtggcgagctgttcggcctgccatcgccggaacgtctggcggagctggttggtagcacggtgtacctgatcggtgaacacctgaccgagcacctgaacctgctggctcgtgcctatttggagcgctacggtgcccgtcaagtggtgatgattgttgagacggaaaccggtgcggaaaccatgcgtcgtctgttgcatgatcacgtcgaggcaggtcgcctgatgactattgtggcaggtgatcagattgaggcagcgattgaccaagcgatcacgcgctatggccgtccgggtccggtggtgtgcactccattccgtccactgccaaccgttccgctggtcggtcgtaaagactccgattggagcaccgttttgagcgaggcggaatttgcggaactgtgtgagcatcagctgacccaccatttccgtgttgctcgtaagatcgccttgtcggatggcgcgtcgctggcgttggttaccccggaaacgactgcgactagcaccacggagcaatttgctctggcgaacttcatcaagaccaccctgcacgcgttcaccgcgaccatcggtgttgagtcggagcgcaccgcgcaacgtattctgattaaccaggttgatctgacgcgccgcgcccgtgcggaagagccgcgtgacccgcacgagcgtcagcaggaattggaacgcttcattgaagccgttctgctggttaccgctccgctgcctcctgaggcagacacgcgctacgcaggccgtattcaccgcggtcgtgcgattaccgtctaatagaagcttggctgttttggcggatgagagaagattttcagcctgatacagattaaatcagaacgcagaagcggtctgataaaacagaatttgcctggcggcagtagcgcggtggtcccacctgaccccatgccgaactcagaagtgaaacgccgtagcgccgatggtagtgtggggtctccccatgcgagagtagggaactgccaggcatcaaataaaacgaaaggctcagtcgaaagactgggcctttcgttttatctgttgtttgtcggtgaacgctctcctgagtaggacaaatccgccgggagcggatttgaacgttgcgaagcaacggcccggagggtggcgggcaggacgcccgccataaactgccaggcatcaaattaagcagaaggccatcctgacggatggcctttttgcgtttctacaaactctttttgtttatttttctaaatacattcaaatatgtatccgctcatgagacaataaccctgataaatgcttcaataatattgaaaaaggaagagtatgagtattcaacatttccgtgtcgcccttattcccttttttgcggcattttgccttcctgtttttgctcacccagaaacgctggtgaaagtaaaagatgctgaagatcagttgggtgcacgagtgggttacatcgaactggatctcaacagcggtaagatccttgagagttttcgccccgaagaacgttttccaatgatgagcacttttaaagttctgctatgtggcgcggtattatcccgtgttgacgccgggcaagagcaactcggtcgccgcatacactattctcagaatgacttggttgagtactcaccagtcacagaaaagcatcttacggatggcatgacagtaagagaattatgcagtgctgccataaccatgagtgataacactgcggccaacttacttctgacaacgatcggaggaccgaaggagctaaccgcttttttgcacaacatgggggatcatgtaactcgccttgatcgttgggaaccggagctgaatgaagccataccaaacgacgagcgtgacaccacgatgcctgtagcaatggcaacaacgttgcgcaaactattaactggcgaactacttactctagcttcccggcaacaattaatagactggatggaggcggataaagttgcaggaccacttctgcgctcggcccttccggctggctggtttattgctgataaatctggagccggtgagcgtgggtctcgcggtatcattgcagcactggggccagatggtaagccctcccgtatcgtagttatctacacgacggggagtcaggcaactatggatgaacgaaatagacagatcgctgagataggtgcctcactgattaagcattggtaactgtcagaccaagtttactcatatatactttagattgatttaaaacttcatttttaatttaaaaggatctaggtgaagatcctttttgataatctcatgaccaaaatcccttaacgtgagttttcgttccactgagcgtcagaccccgtagaaaagatcaaaggatcttcttgagatcctttttttctgcgcgtaatctgctgcttgcaaacaaaaaaaccaccgctaccagcggtggtttgtttgccggatcaagagctaccaactctttttccgaaggtaactggcttcagcagagcgcagataccaaatactgtccttctagtgtagccgtagttaggccaccacttcaagaactctgtagcaccgcctacatacctcgctctgctaatcctgttaccagtggctgctgccagtggcgataagtcgtgtcttaccgggttggactcaagacgatagttaccggataaggcgcagcggtcgggctgaacggggggttcgtgcacacagcccagcttggagcgaacgacctacaccgaactgagatacctacagcgtgagctatgagaaagcgccacgcttcccgaagggagaaaggcggacaggtatccggtaagcggcagggtcggaacaggagagcgcacgagggagcttccagggggaaacgcctggtatctttatagtcctgtcgggtttcgccacctctgacttgagcgtcgatttttgtgatgctcgtcaggggggcggagcctatggaaaaacgccagcaacgcggcctttttacggttcctggccttttgctggccttttgctcacatgttctttcctgcgttatcccctgattctgtggataaccgtattaccgcctttgagtgagctgataccgctcgccgcagccgaacgaccgagcgcagcgagtcagtgagcgaggaagcggaagagcgcctgatgcggtattttctccttacgcatctgtgcggtatttcacaccgcatatggtgcactctcagtacaatctgctctgatgccgcatagttaagccagtatacactccgctatcgctacgtgactgggtcatggctgcgccccgacacccgccaacacccgctgacgcgccctgacgggcttgtctgctcccggcatccgcttacagacaagctgtgaccgtctccgggagctgcatgtgtcagaggttttcaccgtcatcaccgaaacgcgcgaggcagcagatcaattcgcgcgcgaaggcgaagcggcatgcatttacgttgacaccatcgaatggtgcaaaacctttcgcggtatggcatgatagcgcccggaagagagtcaattcagggtggtgaatgtgaaaccagtaacgttatacgatgtcgcagagtatgccggtgtctcttatcagaccgtttcccgcgtggtgaaccaggccagccacgtttctgcgaaaacgcgggaaaaagtggaagcggcgatggcggagctgaattacattcccaaccgcgtggcacaacaactggcgggcaaacagtcgttgctgattggcgttgccacctccagtctggccctgcacgcgccgtcgcaaattgtcgcggcgattaaatctcgcgccgatcaactgggtgccagcgtggtggtgtcgatggtagaacgaagcggcgtcgaagcctgtaaagcggcggtgcacaatcttctcgcgcaacgcgtcagtgggctgatcattaactatccgctggatgaccaggatgccattgctgtggaagctgcctgcactaatgttccggcgttatttcttgatgtctctgaccagacacccatcaacagtattattttctcccatgaagacggtacgcgactgggcgtggagcatctggtcgcattgggtcaccagcaaatcgcgctgttagcgggcccattaagttctgtctcggcgcgtctgcgtctggctggctggcataaatatctcactcgcaatcaaattcagccgatagcggaacgggaaggcgactggagtgccatgtccggttttcaacaaaccatgcaaatgctgaatgagggcatcgttcccactgcgatgctggttgccaacgatcagatggcgctgggcgcaatgcgcgccattaccgagtccgggctgcgcgttggtgcggatatctcggtagtgggatacgacgataccgaagacagctcatgttatatcccgccgtcaaccaccatcaaacaggattttcgcctgctggggcaaaccagcgtggaccgcttgctgcaactctctcagggccaggcggtgaagggcaatcagctgttgcccgtctcactggtgaaaagaaaaaccaccctggcgcccaatacgcaaaccgcctctccccgcgcgttggccgattcattaatgcagctggcacgacaggtttcccgactggaaagcgggcagtgagcgcaacgcaattaatgtgagttagcgcgaattgatctg

SEQ ID NO: 874 - DNA, 7934 bp, Artificial Sequence
  Description of Artificial Sequence: Synthetic polynucleotide
catggccggtacgggtcgtttggctggtaaaattgcattgatcaccggtggtgctggtaacattggttccgagctgacccgccgttttctggccgagggtgcgacggttattatcagcggccgtaaccgtgcgaagctgaccgcgctggccgagcgcatgcaagccgaggccggcgtgccggccaagcgcattgatttggaggtgatggatggttccgaccctgtggctgtccgtgccggtatcgaggcaatcgtcgctcgccacggtcagattgacattctggttaacaacgcgggctccgccggtgcccaacgtcgcttggcggaaattccgctgacggaggcagaattgggtccgggtgcggaggagactttgcacgcttcgatcgcgaatctgttgggcatgggttggcacctgatgcgtattgcggctccgcacatgccagttggctccgcagttatcaacgtttcgactattttctcgcgcgcagagtactatggtcgcattccgtacgttaccccgaaggcagcgctgaacgctttgtcccagctggctgcccgcgagctgggcgctcgtggcatccgcgttaacactattttcccaggtcctattgagtccgaccgcatccgtaccgtgtttcaacgtatggatcaactgaagggtcgcccggagggcgacaccgcccatcactttttgaacaccatgcgcctgtgccgcgcaaacgaccaaggcgctttggaacgccgctttccgtccgttggcgatgttgctgatgcggctgtgtttctggcttctgctgagagcgcggcactgtcgggtgagacgattgaggtcacccacggtatggaactgccggcgtgtagcgaaacctccttgttggcgcgtaccgatctgcgtaccatcgacgcgagcggtcgcactaccctgatttgcgctggcgatcaaattgaagaagttatggccctgacgggcatgctgcgtacgtgcggtagcgaagtgattatcggcttccgttctgcggctgccctggcgcaatttgagcaggcagtgaatgaatctcgccgtctggcaggtgcggatttcaccccgccgatcgctttgccgttggacccacgtgacccggccaccattgatgcggttttcgattggggcgcaggcgagaatacgggtggcatccatgcggcggtcattctgccggcaacctcccacgaaccggctccgtgcgtgattgaagtcgatgacgaacgcgtcctgaatttcctggccgatgaaattaccggcaccatcgttattgcgagccgtttggcgcgctattggcaatcccaacgcctgaccccgggtgcccgtgcccgcggtccgcgtgttatctttctgagcaacggtgccgatcaaaatggtaatgtttacggtcgtattcaatctgcggcgatcggtcaattgattcgcgtttggcgtcacgaggcggagttggactatcaacgtgcatccgccgcaggcgatcacgttctgccgccggtttgggcgaaccagattgtccgtttcgctaaccgctccctggaaggtctggagttcgcgtgcgcgtggaccgcacagctgctgcacagccaacgtcatattaacgaaattacgctgaacattccagccaatattagcgcgaccacgggcgcacgttccgccagcgtcggctgggccgagtccttgattggtctgcacctgggcaaggtggctctgattaccggtggttcggcgggcatcggtggtcaaatcggtcgtctgctggccttgtctggcgcgcgtgtgatgctggccgctcgcgatcgccataaattggaacagatgcaagccatgattcaaagcgaattggcggaggttggttataccgatgtggaggaccgtgtgcacatcgctccgggttgcgatgtgagcagcgaggcgcagctggcagatctggtggaacgtacgctgtccgcattcggtaccgtggattatttgattaataacgccggtattgcgggcgtggaggagatggtgatcgacatgccggtggaaggctggcgtcacaccctgtttgccaacctgatttcgaattattcgctgatgcgcaagttggcgccgctgatgaagaagcaaggtagcggttacatcctgaacgtttcttcctattttggcggtgagaaggacgcggcgattccttatccgaaccgcgccgactacgccgtctccaaggctggccaacgcgcgatggcggaagtgttcgctcgtttcctgggtccagagattcagatcaatgctattgccccaggtccggttgaaggcgaccgcctgcgtggtaccggtgagcgtccgggcctgtttgctcgtcgcgcccgtctgatcttggagaataaacgcctgaacgaattgcacgcggctttgattgctgcggcccgcaccgatgagcgctcgatgcacgagttggttgaattgttgctgccgaacgacgtggccgcgttggagcagaacccagcggcccctaccgcgctgcgtgagctggcacgccgcttccgtagcgaaggtgatccggcggcaagctcctcgtccgccttgctgaatcgctccatcgctgccaagctgttggctcgcttgcataacggtggctatgtgctgccggcggatatttttgcaaatctgcctaatccgccggacccgttctttacccgtgcgcaaattgaccgcgaagctcgcaaggtgcgtgatggtattatgggtatgctgtatctgcagcgtatgccaaccgagtttgacgtcgctatggcaaccgtgtactatctggccgatcgtaacgtgagcggcgaaactttccatccgtctggtggtttgcgctacgagcgtaccccgaccggtggcgagctgttcggcctgccatcgccggaacgtctggcggagctggttggtagcacggtgtacctgatcggtgaacacctgaccgagcacctgaacctgctggctcgtgcctatttggagcgctacggtgcccgtcaagtggtgatgattgttgagacggaaaccggtgcggaaaccatgcgtcgtctgttgcatgatcacgtcgaggcaggtcgcctgatgactattgtggcaggtgatcagattgaggcagcgattgaccaagcgatcacgcgctatggccgtccgggtccggtggtgtgcactccattccgtccactgccaaccgttccgctggtcggtcgtaaagactccgattggagcaccgttttgagcgaggcggaatttgcggaactgtgtgagcatcagctgacccaccatttccgtgttgctcgtaagatcgccttgtcggatggcgcgtcgctggcgttggttaccccggaaacgactgcgactagcaccacggagcaatttgctctggcgaacttcatcaagaccaccctgcacgcgttcaccgcgaccatcggtgttgagtcggagcgcaccgcgcaacgtattctgattaaccaggttgatctgacgcgccgcgcccgtgcggaagagccgcgtgacccgcacgagcgtcagcaggaattggaacgcttcattgaagccgttctgctggttaccgctccgctgcctcctgaggcagacacgcgctacgcaggccgtattcaccgcggtcgtgcgattaccgtctaatagaagcttggctgttttggcggatgagagaagattttcagcctgatacagattaaatcagaacgcagaagcggtctgataaaacagaatttgcctggcggcagtagcgcggtggtcccacctgaccccatgccgaactcagaagtgaaacgccgtagcgccgatggtagtgtggggtctccccatgcgagagtagggaactgccaggcatcaaataaaacgaaaggctcagtcgaaagactgggcctttcgttttatctgttgtttgtcggtgaacgctctcctgagtaggacaaatccgccgggagcggatttgaacgttgcgaagcaacggcccggagggtggcgggcaggacgcccgccataaactgccaggcatcaaattaagcagaaggccatcctgacggatggcctttttgcgtttctacaaactctttttgtttatttttctaaatacattcaaatatgtatccgctcatgagacaataaccctgataaatgcttcaataatattgaaaaaggaagagtatgagtattcaacatttccgtgtcgcccttattcccttttttgcggcattttgccttcctgtttttgctcacccagaaacgctggtgaaagtaaaagatgctgaagatcagttgggtgcacgagtgggttacatcgaactggatctcaacagcggtaagatccttgagagttttcgccccgaagaacgttttccaatgatgagcacttttaaagttctgctatgtggcgcggtattatcccgtgttgacgccgggcaagagcaactcggtcgccgcatacactattctcagaatgacttggttgagtactcaccagtcacagaaaagcatcttacggatggcatgacagtaagagaattatgcagtgctgccataaccatgagtgataacactgcggccaacttacttctgacaacgatcggaggaccgaaggagctaaccgcttttttgcacaacatgggggatcatgtaactcgccttgatcgttgggaaccggagctgaatgaagccataccaaacgacgagcgtgacaccacgatgcctgtagcaatggcaacaacgttgcgcaaactattaactggcgaactacttactctagcttcccggcaacaattaatagactggatggaggcggataaagttgcaggaccacttctgcgctcggcccttccggctggctggtttattgctgataaatctggagccggtgagcgtgggtctcgcggtatcattgcagcactggggccagatggtaagccctcccgtatcgtagttatctacacgacggggagtcaggcaactatggatgaacgaaatagacagatcgctgagataggtgcctcactgattaagcattggtaactgtcagaccaagtttactcatatatactttagattgatttaaaacttcatttttaatttaaaaggatctaggtgaagatcctttttgataatctcatgaccaaaatcccttaacgtgagttttcgttccactgagcgtcagaccccgtagaaaagatcaaaggatcttcttgagatcctttttttctgcgcgtaatctgctgcttgcaaacaaaaaaaccaccgctaccagcggtggtttgtttgccggatcaagagctaccaactctttttccgaaggtaactggcttcagcagagcgcagataccaaatactgtccttctagtgtagccgtagttaggccaccacttcaagaactctgtagcaccgcctacatacctcgctctgctaatcctgttaccagtggctgctgccagtggcgataagtcgtgtcttaccgggttggactcaagacgatagttaccggataaggcgcagcggtcgggctgaacggggggttcgtgcacacagcccagcttggagcgaacgacctacaccgaactgagatacctacagcgtgagctatgagaaagcgccacgcttcccgaagggagaaaggcggacaggtatccggtaagcggcagggtcggaacaggagagcgcacgagggagcttccagggggaaacgcctggtatctttatagtcctgtcgggtttcgccacctctgacttgagcgtcgatttttgtgatgctcgtcaggggggcggagcctatggaaaaacgccagcaacgcggcctttttacggttcctggccttttgctggccttttgctcacatgttctttcctgcgttatcccctgattctgtggataaccgtattaccgcctttgagtgagctgataccgctcgccgcagccgaacgaccgagcgcagcgagtcagtgagcgaggaagcggaagagcgcctgatgcggtattttctccttacgcatctgtgcggtatttcacaccgcatatggtgcactctcagtacaatctgctctgatgccgcatagttaagccagtatacactccgctatcgctacgtgactgggtcatggctgcgccccgacacccgccaacacccgctgacgcgccctgacgggcttgtctgctcccggcatccgcttacagacaagctgtgaccgtctccgggagctgcatgtgtcagaggttttcaccgtcatcaccgaaacgcgcgaggcagcagatcaattcgcgcgcgaaggcgaagcggcatgcatttacgttgacaccatcgaatggtgcaaaacctttcgcggtatggcatgatagcgcccggaagagagtcaattcagggtggtgaatgtgaaaccagtaacgttatacgatgtcgcagagtatgccggtgtctcttatcagaccgtttcccgcgtggtgaaccaggccagccacgtttctgcgaaaacgcgggaaaaagtggaagcggcgatggcggagctgaattacattcccaaccgcgtggcacaacaactggcgggcaaacagtcgttgctgattggcgttgccacctccagtctggccctgcacgcgccgtcgcaaattgtcgcggcgattaaatctcgcgccgatcaactgggtgccagcgtggtggtgtcgatggtagaacgaagcggcgtcgaagcctgtaaagcggcggtgcacaatcttctcgcgcaacgcgtcagtgggctgatcattaactatccgctggatgaccaggatgccattgctgtggaagctgcctgcactaatgttccggcgttatttcttgatgtctctgaccagacacccatcaacagtattattttctcccatgaagacggtacgcgactgggcgtggagcatctggtcgcattgggtcaccagcaaatcgcgctgttagcgggcccattaagttctgtctcggcgcgtctgcgtctggctggctggcataaatatctcactcgcaatcaaattcagccgatagcggaacgggaaggcgactggagtgccatgtccggttttcaacaaaccatgcaaatgctgaatgagggcatcgttcccactgcgatgctggttgccaacgatcagatggcgctgggcgcaatgcgcgccattaccgagtccgggctgcgcgttggtgcggatatctcggtagtgggatacgacgataccgaagacagctcatgttatatcccgccgtcaaccaccatcaaacaggattttcgcctgctggggcaaaccagcgtggaccgcttgctgcaactctctcagggccaggcggtgaagggcaatcagctgttgcccgtctcactggtgaaaagaaaaaccaccctggcgcccaatacgcaaaccgcctctccccgcgcgttggccgattcattaatgcagctggcacgacaggtttcccgactggaaagcgggcagtgagcgcaacgcaattaatgtgagttagcgcgaattgatctggtttgacagcttatcatcgactgcacggtgcaccaatgcttctggcgtcaggcagccatcggaagctgtggtatggctgtgcaggtcgtaaatcactgcataattcgtgtcgctcaaggcgcactcccgttctggataatgttttttgcgccgacatcataacggttctggcaaatattctgaaatgagctgttgacaattaatcatccggctcgtataatgtgtggaattgtgagcggataacaatttcacacaggaaacagcgccgctgagaaaaagcgaagcggcactgctctttaacaatttatcagacaatctgtgtgggcactcgaccggaattatcgattaactttattattaaaaattaaagaggtatatattaatgtatcgattaaataaggaggaataaac

SEQ ID NO: 875 - DNA, 8894 bp, Artificial Sequence
  Description of Artificial Sequence: Synthetic polynucleotide
ccttcaactcagcaaaagttcgatttattcaacaaagccacgttgtgtctcaaaatctctgatgttacattgcacaagataaaaatatatcatcatgaacaataaaactgtctgcttacataaacagtaatacaaggggtgttatgagccatattcaacgggaaacgtcttgctcgaggccgcgattaaattccaacatggatgctgatttatatgggtataaatgggctcgcgataatgtcgggcaatcaggtgcgacaatctatcgattgtatgggaagcccgatgcgccagagttgtttctgaaacatggcaaaggtagcgttgccaatgatgttacagatgagatggtcagactaaactggctgacggaatttatgcctcttccgaccatcaagcattttatccgtactcctgatgatgcatggttactcaccactgcgatccccgggaaaacagcattccaggtattagaagaatatcctgattcaggtgaaaatattgttgatgcgctggcagtgttcctgcgccggttgcattcgattcctgtttgtaattgtccttttaacagcgatcgcgtatttcgtctcgctcaggcgcaatcacgaatgaataacggtttggttgatgcgagtgattttgatgacgagcgtaatggctggcctgttgaacaagtctggaaagaaatgcataagcttttgccattctcaccggattcagtcgtcactcatggtgatttctcacttgataaccttatttttgacgaggggaaattaataggttgtattgatgttggacgagtcggaatcgcagaccgataccaggatcttgccatcctatggaactgcctcggtgagttttctccttcattacagaaacggctttttcaaaaatatggtattgataatcctgatatgaataaattgcagtttcatttgatgctcgatgagtttttctaatcgagtcaggcaactatggatgaacgaaatagacagatcgctgagataggtgcctcactgattaagcattggtaactgtcagaccaagtttactcatatatactttagattgatttaaaacttcatttttaatttaaaaggatctaggtgaagatcctttttgataatctcatgaccaaaatcccttaacgtgagttttcgttccactgagcgtcagaccccgtagaaaagatcaaaggatcttcttgagatcctttttttctgcgcgtaatctgctgcttgcaaacaaaaaaaccaccgctaccagcggtggtttgtttgccggatcaagagctaccaactctttttccgaaggtaactggcttcagcagagcgcagataccaaatactgtccttctagtgtagccgtagttaggccaccacttcaagaactctgtagcaccgcctacatacctcgctctgctaatcctgttaccagtggctgctgccagtggcgataagtcgtgtcttaccgggttggactcaagacgatagttaccggataaggcgcagcggtcgggctgaacggggggttcgtgcacacagcccagcttggagcgaacgacctacaccgaactgagatacctacagcgtgagctatgagaaagcgccacgcttcccgaagggagaaaggcggacaggtatccggtaagcggcagggtcggaacaggagagcgcacgagggagcttccagggggaaacgcctggtatctttatagtcctgtcgggtttcgccacctctgacttgagcgtcgatttttgtgatgctcgtcaggggggcggagcctatggaaaaacgccagcaacgcggcctttttacggttcctggccttttgctggccttttgctcacatgttctttcctgcgttatcccctgattctgtggataaccgtattaccgcctttgagtgagctgataccgctcgccgcagccgaacgaccgagcgcagcgagtcagtgagcgaggaagcggaagagcgcctgatgcggtattttctccttacgcatctgtgcggtatttcacaccgcatatggtgcactctcagtacaatctgctctgatgccgcatagttaagccagtatacactccgctatcgctacgtgactgggtcatggctgcgccccgacacccgccaacacccgctgacgcgccctgacgggcttgtctgctcccggcatccgcttacagacaagctgtgaccgtctccgggagctgcatgtgtcagaggttttcaccgtcatcaccgaaacgcgcgaggcagcagatcaattcgcgcgcgaaggcgaagcggcatgcatttacgttgacaccatcgaatggtgcaaaacctttcgcggtatggcatgatagcgcccggaagagagtcaattcagggtggtgaatgtgaaaccagtaacgttatacgatgtcgcagagtatgccggtgtctcttatcagaccgtttcccgcgtggtgaaccaggccagccacgtttctgcgaaaacgcgggaaaaagtggaagcggcgatggcggagctgaattacattcccaaccgcgtggcacaacaactggcgggcaaacagtcgttgctgattggcgttgccacctccagtctggccctgcacgcgccgtcgcaaattgtcgcggcgattaaatctcgcgccgatcaactgggtgccagcgtggtggtgtcgatggtagaacgaagcggcgtcgaagcctgtaaagcggcggtgcacaatcttctcgcgcaacgcgtcagtgggctgatcattaactatccgctggatgaccaggatgccattgctgtggaagctgcctgcactaatgttccggcgttatttcttgatgtctctgaccagacacccatcaacagtattattttctcccatgaagacggtacgcgactgggcgtggagcatctggtcgcattgggtcaccagcaaatcgcgctgttagcgggcccattaagttctgtctcggcgcgtctgcgtctggctggctggcataaatatctcactcgcaatcaaattcagccgatagcggaacgggaaggcgactggagtgccatgtccggttttcaacaaaccatgcaaatgctgaatgagggcatcgttcccactgcgatgctggttgccaacgatcagatggcgctgggcgcaatgcgcgccattaccgagtccgggctgcgcgttggtgcggatatctcggtagtgggatacgacgataccgaagacagctcatgttatatcccgccgtcaaccaccatcaaacaggattttcgcctgctggggcaaaccagcgtggaccgcttgctgcaactctctcagggccaggcggtgaagggcaatcagctgttgcccgtctcactggtgaaaagaaaaaccaccctggcgcccaatacgcaaaccgcctctccccgcgcgttggccgattcattaatgcagctggcacgacaggtttcccgactggaaagcgggcagtgagcgcaacgcaattaatgtgagttagcgcgaattgatctggtttgacagcttatcatcgactgcacggtgcaccaatgcttctggcgtcaggcagccatcggaagctgtggtatggctgtgcaggtcgtaaatcactgcataattcgtgtcgctcaaggcgcactcccgttctggataatgttttttgcgccgacatcataacggttctggcaaatattctgaaatgagctgttgacaattaatcatccggctcgtataatgtgtggaattgtgagcggataacaatttcacacaggaaacagcgccgctgagaaaaagcgaagcggcactgctctttaacaatttatcagacaatctgtgtgggcactcgaccggaattatcgattaactttattattaaaaattaaagaggtatatattaatgtatcgattaaataaggaggaataaaccatggccggtacgggtcgtttggctggtaaaattgcattgatcaccggtggtgctggtaacattggttccgagctgacccgccgttttctggccgagggtgcgacggttattatcagcggccgtaaccgtgcgaagctgaccgcgctggccgagcgcatgcaagccgaggccggcgtgccggccaagcgcattgatttggaggtgatggatggttccgaccctgtggctgtccgtgccggtatcgaggcaatcgtcgctcgccacggtcagattgacattctggttaacaacgcgggctccgccggtgcccaacgtcgcttggcggaaattccgctgacggaggcagaattgggtccgggtgcggaggagactttgcacgcttcgatcgcgaatctgttgggcatgggttggcacctgatgcgtattgcggctccgcacatgccagttggctccgcagttatcaacgtttcgactattttctcgcgcgcagagtactatggtcgcattccgtacgttaccccgaaggcagcgctgaacgctttgtcccagctggctgcccgcgagctgggcgctcgtggcatccgcgttaacactattttcccaggtcctattgagtccgaccgcatccgtaccgtgtttcaacgtatggatcaactgaagggtcgcccggagggcgacaccgcccatcactttttgaacaccatgcgcctgtgccgcgcaaacgaccaaggcgctttggaacgccgctttccgtccgttggcgatgttgctgatgcggctgtgtttctggcttctgctgagagcgcggcactgtcgggtgagacgattgaggtcacccacggtatggaactgccggcgtgtagcgaaacctccttgttggcgcgtaccgatctgcgtaccatcgacgcgagcggtcgcactaccctgatttgcgctggcgatcaaattgaagaagttatggccctgacgggcatgctgcgtacgtgcggtagcgaagtgattatcggcttccgttctgcggctgccctggcgcaatttgagcaggcagtgaatgaatctcgccgtctggcaggtgcggatttcaccccgccgatcgctttgccgttggacccacgtgacccggccaccattgatgcggttttcgattggggcgcaggcgagaatacgggtggcatccatgcggcggtcattctgccggcaacctcccacgaaccggctccgtgcgtgattgaagtcgatgacgaacgcgtcctgaatttcctggccgatgaaattaccggcaccatcgttattgcgagccgtttggcgcgctattggcaatcccaacgcctgaccccgggtgcccgtgcccgcggtccgcgtgttatctttctgagcaacggtgccgatcaaaatggtaatgtttacggtcgtattcaatctgcggcgatcggtcaattgattcgcgtttggcgtcacgaggcggagttggactatcaacgtgcatccgccgcaggcgatcacgttctgccgccggtttgggcgaaccagattgtccgtttcgctaaccgctccctggaaggtctggagttcgcgtgcgcgtggaccgcacagctgctgcacagccaacgtcatattaacgaaattacgctgaacattccagccaatattagcgcgaccacgggcgcacgttccgccagcgtcggctgggccgagtccttgattggtctgcacctgggcaaggtggctctgattaccggtggttcggcgggcatcggtggtcaaatcggtcgtctgctggccttgtctggcgcgcgtgtgatgctggccgctcgcgatcgccataaattggaacagatgcaagccatgattcaaagcgaattggcggaggttggttataccgatgtggaggaccgtgtgcacatcgctccgggttgcgatgtgagcagcgaggcgcagctggcagatctggtggaacgtacgctgtccgcattcggtaccgtggattatttgattaataacgccggtattgcgggcgtggaggagatggtgatcgacatgccggtggaaggctggcgtcacaccctgtttgccaacctgatttcgaattattcgctgatgcgcaagttggcgccgctgatgaagaagcaaggtagcggttacatcctgaacgtttcttcctattttggcggtgagaaggacgcggcgattccttatccgaaccgcgccgactacgccgtctccaaggctggccaacgcgcgatggcggaagtgttcgctcgtttcctgggtccagagattcagatcaatgctattgccccaggtccggttgaaggcgaccgcctgcgtggtaccggtgagcgtccgggcctgtttgctcgtcgcgcccgtctgatcttggagaataaacgcctgaacgaattgcacgcggctttgattgctgcggcccgcaccgatgagcgctcgatgcacgagttggttgaattgttgctgccgaacgacgtggccgcgttggagcagaacccagcggcccctaccgcgctgcgtgagctggcacgccgcttccgtagcgaaggtgatccggcggcaagctcctcgtccgccttgctgaatcgctccatcgctgccaagctgttggctcgcttgcataacggtggctatgtgctgccggcggatatttttgcaaatctgcctaatccgccggacccgttctttacccgtgcgcaaattgaccgcgaagctcgcaaggtgcgtgatggtattatgggtatgctgtatctgcagcgtatgccaaccgagtttgacgtcgctatggcaaccgtgtactatctggccgatcgtaacgtgagcggcgaaactttccatccgtctggtggtttgcgctacgagcgtaccccgaccggtggcgagctgttcggcctgccatcgccggaacgtctggcggagctggttggtagcacggtgtacctgatcggtgaacacctgaccgagcacctgaacctgctggctcgtgcctatttggagcgctacggtgcccgtcaagtggtgatgattgttgagacggaaaccggtgcggaaaccatgcgtcgtctgttgcatgatcacgtcgaggcaggtcgcctgatgactattgtggcaggtgatcagattgaggcagcgattgaccaagcgatcacgcgctatggccgtccgggtccggtggtgtgcactccattccgtccactgccaaccgttccgctggtcggtcgtaaagactccgattggagcaccgttttgagcgaggcggaatttgcggaactgtgtgagcatcagctgacccaccatttccgtgttgctcgtaagatcgccttgtcggatggcgcgtcgctggcgttggttaccccggaaacgactgcgactagcaccacggagcaatttgctctggcgaacttcatcaagaccaccctgcacgcgttcaccgcgaccatcggtgttgagtcggagcgcaccgcgcaacgtattctgattaaccaggttgatctgacgcgccgcgcccgtgcggaagagccgcgtgacccgcacgagcgtcagcaggaattggaacgcttcattgaagccgttctgctggttaccgctccgctgcctcctgaggcagacacgcgctacgcaggccgtattcaccgcggtcgtgcgattaccgtctaatagaagcttggctgttttggcggatgagagaagattttcagcctgatacagattaaatcagaacgcagaagcggtctgataaaacagaatttgcctggcggcagtagcgcggtggtcccacctgaccccatgccgaactcagaagtgaaacgccgtagcgccgatggtagtgtggggtctccccatgcgagagtagggaactgccaggcatcaaataaaacgaaaggctcagtcgaaagactgggcctttcgttttatctgttgtttgtcggtgaacgctctcctgagtaggacaaatccgccgggagcggatttgaacgttgcgaagcaacggcccggagggtggcgggcaggacgcccgccataaactgccaggcatcaaattaagcagaaggccatcctgacggatggcctttttgcgtttctacaaactctttttgtttatttttctaaatacattcaaatatgtatccgctcatgagacaataaccctgataaatgcttcaataatattgaaaaaggaagagtatgagtattcaacatttccgtgtcgcccttattcccttttttgcggcattttgccttcctgtttttgctcacccagaaacgctggtgaaagtaaaagatgctgaagatcagttgggtgcacgagtgggttacatcgaactggatctcaacagcggtaagatccttgagagttttcgccccgaagaacgttttccaatgatgagcacttttaaagttctgctatgtggcgcggtattatcccgtgttgacgccgggcaagagcaactcggtcgccgcatacactattctcagaatgacttggttgagtactcaccagtcacagaaaagcatcttacggatggcatgacagtaagagaattatgcagtgctgccataaccatgagtgataacactgcggccaacttacttctgacaacgatcggaggaccgaaggagctaaccgcttttttgcacaacatgggggatcatgtaactcgccttgatcgttgggaaccggagctgaatgaagccataccaaacgacgagcgtgacaccacgatgcctgtagcaatggcaacaacgttgcgcaaactattaactggcgaactacttactctagcttcccggcaacaattaatagactggatggaggcggataaagttgcaggaccacttctgcgctcggcccttccggctggctggtttattgctgataaatctggagccggtgagcgtgggtctcgcggtatcattgcagcactggggccagatggtaagccctcccgtatcgtagttatctacacgacgg

SEQ ID NO: 876 - DNA, 11744 bp, Artificial Sequence
  Description of Artificial Sequence: Synthetic polynucleotide
ccttcaactcagcaaaagttcgatttattcaacaaagccacgttgtgtctcaaaatctctgatgttacattgcacaagataaaaatatatcatcatgaacaataaaactgtctgcttacataaacagtaatacaaggggtgttatgagccatattcaacgggaaacgtcttgctcgaggccgcgattaaattccaacatggatgctgatttatatgggtataaatgggctcgcgataatgtcgggcaatcaggtgcgacaatctatcgattgtatgggaagcccgatgcgccagagttgtttctgaaacatggcaaaggtagcgttgccaatgatgttacagatgagatggtcagactaaactggctgacggaatttatgcctcttccgaccatcaagcattttatccgtactcctgatgatgcatggttactcaccactgcgatccccgggaaaacagcattccaggtattagaagaatatcctgattcaggtgaaaatattgttgatgcgctggcagtgttcctgcgccggttgcattcgattcctgtttgtaattgtccttttaacagcgatcgcgtatttcgtctcgctcaggcgcaatcacgaatgaataacggtttggttgatgcgagtgattttgatgacgagcgtaatggctggcctgttgaacaagtctggaaagaaatgcataagcttttgccattctcaccggattcagtcgtcactcatggtgatttctcacttgataaccttatttttgacgaggggaaattaataggttgtattgatgttggacgagtcggaatcgcagaccgataccaggatcttgccatcctatggaactgcctcggtgagttttctccttcattacagaaacggctttttcaaaaatatggtattgataatcctgatatgaataaattgcagtttcatttgatgctcgatgagtttttctaatcgagtcaggcaactatggatgaacgaaatagacagatcgctgagataggtgcctcactgattaagcattggtaactgtcagaccaagtttactcatatatactttagattgatttaaaacttcatttttaatttaaaaggatctaggtgaagatcctttttgataatctcatgaccaaaatcccttaacgtgagttttcgttccactgagcgtcagaccccgtagaaaagatcaaaggatcttcttgagatcctttttttctgcgcgtaatctgctgcttgcaaacaaaaaaaccaccgctaccagcggtggtttgtttgccggatcaagagctaccaactctttttccgaaggtaactggcttcagcagagcgcagataccaaatactgtccttctagtgtagccgtagttaggccaccacttcaagaactctgtagcaccgcctacatacctcgctctgctaatcctgttaccagtggctgctgccagtggcgataagtcgtgtcttaccgggttggactcaagacgatagttaccggataaggcgcagcggtcgggctgaacggggggttcgtgcacacagcccagcttggagcgaacgacctacaccgaactgagatacctacagcgtgagctatgagaaagcgccacgcttcccgaagggagaaaggcggacaggtatccggtaagcggcagggtcggaacaggagagcgcacgagggagcttccagggggaaacgcctggtatctttatagtcctgtcgggtttcgccacctctgacttgagcgtcgatttttgtgatgctcgtcaggggggcggagcctatggaaaaacgccagcaacgcggcctttttacggttcctggccttttgctggccttttgctcacatgttctttcctgcgttatcccctgattctgtggataaccgtattaccgcctttgagtgagctgataccgctcgccgcagccgaacgaccgagcgcagcgagtcagtgagcgaggaagcggaagagcgcctgatgcggtattttctccttacgcatctgtgcggtatttcacaccgcatatcgtggcggctggcgttccttgtcgggttattcgcgaaataaacgaccgggataagcactattatttcaaagattataaagttgaatcgtcagtttaaattataaaaattgcctgatacgctgcgcttatcaggcctacaagttcagcgatctacattagccgcatccggcatgaacaaagcgcaggaacaagcgtcgcatcatgcctctttgacccacagctgcggaaaacgtactggtgcaaaacgcagggttatgatcatcagcccaacgacgcacagcgcatgaaatgcccagtccatcaggtaattgccgctgatactacgcagcacgccagaaaaccacggggcaagcccggcgatgataaaaccgattccctgcataaacgccaccagcttgccagcaatagccggttgcacagagtgatcgagcgccagcagcaaacagagcggaaacgcgccgcccagacctaacccacacaccatcgcccacaataccggcaattgcatcggcagccagataaagccgcagaaccccaccagttgtaacaccagcgccagcattaacagtttgcgccgatcctgatggcgagccatagcaggcatcagcaaagctcctgcggcttgcccaagcgtcatcaatgccagtaaggaaccgctgtactgcgcgctggcaccaatctcaatatagaaagcgggtaaccaggcaatcaggctggcgtaaccgccgttaatcagaccgaagtaaacacccagcgtccacgcgcggggagtgaataccacgcgaaccggagtggttgttgtcttgtgggaagaggcgacctcgcgggcgctttgccaccaccaggcaaagagcgcaacaacggcaggcagcgcccaccaggcgagtgtttgataccaggtttcgctatgttgaactaaccagggcgttatggcggcaccaagcccaccgccgcccatcagagccgcggaccacagccccatcaccagtggcgtgcgctgctgaaaccgccgtttaatcaccgaaggcatcaccgcctgaatgatgccgatccccaccccaccaagcagtgcgctgctaagcagcagcgcactttgcgggtaaagctcacgcatcaatgcaccgacggcaatcagcaacagactgatggcgacactgcgacgttcgctgacatgctgatgaagccagcttccggccagcgccagcccgcccatggtaaccaccggcagagcggtcaacagggcagccacgctaaagctcattccgctcgcctggcgcaattgcggtagcagtggcccgacggaggtgagcagtggtcgcatattaagaccaatcagcaccagtaccagcagcatcgtgaacgtcttttgatggttgcgcatggctgtcagaacggtttggtcggcagatatttaccatctaaggtgatgaccgcacgttcgccaccttccgggtccgccactttcttaacgtcgagtttgaagttaatcgcgctaataatgccatcgccaaatttctcatgaaccaacgctttcagggttgtaccgtacacctgcaacatttcatagaaacgatacatcgttgggtcagttggaatacggtcatcaatgcagccacgcagtggaatcatctgcaacagtagaatggagtcttcgtcgagatccagcttcgccccgaccaggcgggcggcgtcggcaggaagcgcctgctgacccagcaaagccgcggttacaaaggcttctgccagaccggtgccgtcggcaatctcggcaaatgagagatcttttttagctttgctgagcaaaatggcatcggcaagatcaagacgaatattgcggttaatttgtgactgaatcatggtggaactcctgatggtttaaaaataaggttacgctgcggtcggttggcgtagcggtatggcacaaacgcgaggattagcggccagtggcacaaactggcgggttgcgccgtcaaaagctgcgatgctgccgctttcaatgtcgtagacccagccgtgcagggcgatccgcccctcttcgagcgccaggcgcaccgatggatgagtttgcaaattagccaactgagcaatgacgttttcacgtaccatcgccgcagcttttgacggtaaatcggaatgcgggcgcgcctcattaacgacgcgggctgaatcggcataacgcagccagtgggagacggcaggcatatggtccatgcactgacagctggcaatggcggtcatcgcgccacagttggaatgaccacaaatcacaatgtcagatacccgaagcgcagcgacggcatactccaccgaagcagaaacgccaccgggttccggcccgtaggaagggacgatattgcccgcgttgcgaataacgaacagatcgccaggctcacgttgcgtcaccagctcagggaccagacggctgtcggagcaggagataaaaagtgtgcgcgggctttgctgtgtcgccagctgtttaaacaaggcttcccgcttcggaaatgcctcgcgctggaatttaaggaatccatcaataatctctttcaccgttaacctctgtctgtctctggaatgagaggcagactactcgccgattgtcataaggtaaaagtctcatttatgatgagttccattggatttacttataggttgcgaatgctctctcgacatatcaattattttcttgccgtggctgaacatggcagcttcacccgtgccgccagtgcgttgcacgtctcccaacctgcgctttcccagcagattcgccagttagaggagagtttaggcgtgccgctgtttgaccgtagcgggcgaacgattcgtctcactgatgcaggagaagtctggtatggtgcactctcagtacaatctgctctgatgccgcatagttaagccagtatacactccgctatcgctacgtgactgggtcatggctgcgccccgacacccgccaacacccgctgacgcgccctgacgggcttgtctgctcccggcatccgcttacagacaagctgtgaccgtctccgggagctgcatgtgtcagaggttttcaccgtcatcaccgaaacgcgcgaggcagcagatcaattcgcgcgcgaaggcgaagcggcatgcatttacgttgacaccatcgaatggtgcaaaacctttcgcggtatggcatgatagcgcccggaagagagtcaattcagggtggtgaatgtgaaaccagtaacgttatacgatgtcgcagagtatgccggtgtctcttatcagaccgtttcccgcgtggtgaaccaggccagccacgtttctgcgaaaacgcgggaaaaagtggaagcggcgatggcggagctgaattacattcccaaccgcgtggcacaacaactggcgggcaaacagtcgttgctgattggcgttgccacctccagtctggccctgcacgcgccgtcgcaaattgtcgcggcgattaaatctcgcgccgatcaactgggtgccagcgtggtggtgtcgatggtagaacgaagcggcgtcgaagcctgtaaagcggcggtgcacaatcttctcgcgcaacgcgtcagtgggctgatcattaactatccgctggatgaccaggatgccattgctgtggaagctgcctgcactaatgttccggcgttatttcttgatgtctctgaccagacacccatcaacagtattattttctcccatgaagacggtacgcgactgggcgtggagcatctggtcgcattgggtcaccagcaaatcgcgctgttagcgggcccattaagttctgtctcggcgcgtctgcgtctggctggctggcataaatatctcactcgcaatcaaattcagccgatagcggaacgggaaggcgactggagtgccatgtccggttttcaacaaaccatgcaaatgctgaatgagggcatcgttcccactgcgatgctggttgccaacgatcagatggcgctgggcgcaatgcgcgccattaccgagtccgggctgcgcgttggtgcggatatctcggtagtgggatacgacgataccgaagacagctcatgttatatcccgccgtcaaccaccatcaaacaggattttcgcctgctggggcaaaccagcgtggaccgcttgctgcaactctctcagggccaggcggtgaagggcaatcagctgttgcccgtctcactggtgaaaagaaaaaccaccctggcgcccaatacgcaaaccgcctctccccgcgcgttggccgattcattaatgcagctggcacgacaggtttcccgactggaaagcgggcagtgagcgcaacgcaattaatgtgagttagcgcgaattgatctggtttgacagcttatcatcgactgcacggtgcaccaatgcttctggcgtcaggcagccatcggaagctgtggtatggctgtgcaggtcgtaaatcactgcataattcgtgtcgctcaaggcgcactcccgttctggataatgttttttgcgccgacatcataacggttctggcaaatattctgaaatgagctgttgacaattaatcatccggctcgtataatgtgtggaattgtgagcggataacaatttcacacaggaaacagcgccgctgagaaaaagcgaagcggcactgctctttaacaatttatcagacaatctgtgtgggcactcgaccggaattatcgattaactttattattaaaaattaaagaggtatatattaatgtatcgattaaataaggaggaataaaccatggccggtacgggtcgtttggctggtaaaattgcattgatcaccggtggtgctggtaacattggttccgagctgacccgccgttttctggccgagggtgcgacggttattatcagcggccgtaaccgtgcgaagctgaccgcgctggccgagcgcatgcaagccgaggccggcgtgccggccaagcgcattgatttggaggtgatggatggttccgaccctgtggctgtccgtgccggtatcgaggcaatcgtcgctcgccacggtcagattgacattctggttaacaacgcgggctccgccggtgcccaacgtcgcttggcggaaattccgctgacggaggcagaattgggtccgggtgcggaggagactttgcacgcttcgatcgcgaatctgttgggcatgggttggcacctgatgcgtattgcggctccgcacatgccagttggctccgcagttatcaacgtttcgactattttctcgcgcgcagagtactatggtcgcattccgtacgttaccccgaaggcagcgctgaacgctttgtcccagctggctgcccgcgagctgggcgctcgtggcatccgcgttaacactattttcccaggtcctattgagtccgaccgcatccgtaccgtgtttcaacgtatggatcaactgaagggtcgcccggagggcgacaccgcccatcactttttgaacaccatgcgcctgtgccgcgcaaacgaccaaggcgctttggaacgccgctttccgtccgttggcgatgttgctgatgcggctgtgtttctggcttctgctgagagcgcggcactgtcgggtgagacgattgaggtcacccacggtatggaactgccggcgtgtagcgaaacctccttgttggcgcgtaccgatctgcgtaccatcgacgcgagcggtcgcactaccctgatttgcgctggcgatcaaattgaagaagttatggccctgacgggcatgctgcgtacgtgcggtagcgaagtgattatcggcttccgttctgcggctgccctggcgcaatttgagcaggcagtgaatgaatctcgccgtctggcaggtgcggatttcaccccgccgatcgctttgccgttggacccacgtgacccggccaccattgatgcggttttcgattggggcgcaggcgagaatacgggtggcatccatgcggcggtcattctgccggcaacctcccacgaaccggctccgtgcgtgattgaagtcgatgacgaacgcgtcctgaatttcctggccgatgaaattaccggcaccatcgttattgcgagccgtttggcgcgctattggcaatcccaacgcctgaccccgggtgcccgtgcccgcggtccgcgtgttatctttctgagcaacggtgccgatcaaaatggtaatgtttacggtcgtattcaatctgcggcgatcggtcaattgattcgcgtttggcgtcacgaggcggagttggactatcaacgtgcatccgccgcaggcgatcacgttctgccgccggtttgggcgaaccagattgtccgtttcgctaaccgctccctggaaggtctggagttcgcgtgcgcgtggaccgcacagctgctgcacagccaacgtcatattaacgaaattacgctgaacattccagccaatattagcgcgaccacgggcgcacgttccgccagcgtcggctgggccgagtccttgattggtctgcacctgggcaaggtggctctgattaccggtggttcggcgggcatcggtggtcaaatcggtcgtctgctggccttgtctggcgcgcgtgtgatgctggccgctcgcgatcgccataaattggaacagatgcaagccatgattcaaagcgaattggcggaggttggttataccgatgtggaggaccgtgtgcacatcgctccgggttgcgatgtgagcagcgaggcgcagctggcagatctggtggaacgtacgctgtccgcattcggtaccgtggattatttgattaataacgccggtattgcgggcgtggaggagatggtgatcgacatgccggtggaaggctggcgtcacaccctgtttgccaacctgatttcgaattattcgctgatgcgcaagttggcgccgctgatgaagaagcaaggtagcggttacatcctgaacgtttcttcctattttggcggtgagaaggacgcggcgattccttatccgaaccgcgccgactacgccgtctccaaggctggccaacgcgcgatggcggaagtgttcgctcgtttcctgggtccagagattcagatcaatgctattgccccaggtccggttgaaggcgaccgcctgcgtggtaccggtgagcgtccgggcctgtttgctcgtcgcgcccgtctgatcttggagaataaacgcctgaacgaattgcacgcggctttgattgctgcggcccgcaccgatgagcgctcgatgcacgagttggttgaattgttgctgccgaacgacgtggccgcgttggagcagaacccagcggcccctaccgcgctgcgtgagctggcacgccgcttccgtagcgaaggtgatccggcggcaagctcctcgtccgccttgctgaatcgctccatcgctgccaagctgttggctcgcttgcataacggtggctatgtgctgccggcggatatttttgcaaatctgcctaatccgccggacccgttctttacccgtgcgcaaattgaccgcgaagctcgcaaggtgcgtgatggtattatgggtatgctgtatctgcagcgtatgccaaccgagtttgacgtcgctatggcaaccgtgtactatctggccgatcgtaacgtgagcggcgaaactttccatccgtctggtggtttgcgctacgagcgtaccccgaccggtggcgagctgttcggcctgccatcgccggaacgtctggcggagctggttggtagcacggtgtacctgatcggtgaacacctgaccgagcacctgaacctgctggctcgtgcctatttggagcgctacggtgcccgtcaagtggtgatgattgttgagacggaaaccggtgcggaaaccatgcgtcgtctgttgcatgatcacgtcgaggcaggtcgcctgatgactattgtggcaggtgatcagattgaggcagcgattgaccaagcgatcacgcgctatggccgtccgggtccggtggtgtgcactccattccgtccactgccaaccgttccgctggtcggtcgtaaagactccgattggagcaccgttttgagcgaggcggaatttgcggaactgtgtgagcatcagctgacccaccatttccgtgttgctcgtaagatcgccttgtcggatggcgcgtcgctggcgttggttaccccggaaacgactgcgactagcaccacggagcaatttgctctggcgaacttcatcaagaccaccctgcacgcgttcaccgcgaccatcggtgttgagtcggagcgcaccgcgcaacgtattctgattaaccaggttgatctgacgcgccgcgcccgtgcggaagagccgcgtgacccgcacgagcgtcagcaggaattggaacgcttcattgaagccgttctgctggttaccgctccgctgcctcctgaggcagacacgcgctacgcaggccgtattcaccgcggtcgtgcgattaccgtctaatagaagcttggctgttttggcggatgagagaagattttcagcctgatacagattaaatcagaacgcagaagcggtctgataaaacagaatttgcctggcggcagtagcgcggtggtcccacctgaccccatgccgaactcagaagtgaaacgccgtagcgccgatggtagtgtggggtctccccatgcgagagtagggaactgccaggcatcaaataaaacgaaaggctcagtcgaaagactgggcctttcgttttatctgttgtttgtcggtgaacgctctcctgagtaggacaaatccgccgggagcggatttgaacgttgcgaagcaacggcccggagggtggcgggcaggacgcccgccataaactgccaggcatcaaattaagcagaaggccatcctgacggatggcctttttgcgtttctacaaactctttttgtttatttttctaaatacattcaaatatgtatccgctcatgagacaataaccctgataaatgcttcaataatattgaaaaaggaagagtatgagtattcaacatttccgtgtcgcccttattcccttttttgcggcattttgccttcctgtttttgctcacccagaaacgctggtgaaagtaaaagatgctgaagatcagttgggtgcacgagtgggttacatcgaactggatctcaacagcggtaagatccttgagagttttcgccccgaagaacgttttccaatgatgagcacttttaaagttctgctatgtggcgcggtattatcccgtgttgacgccgggcaagagcaactcggtcgccgcatacactattctcagaatgacttggttgagtactcaccagtcacagaaaagcatcttacggatggcatgacagtaagagaattatgcagtgctgccataaccatgagtgataacactgcggccaacttacttctgacaacgatcggaggaccgaaggagctaaccgcttttttgcacaacatgggggatcatgtaactcgccttgatcgttgggaaccggagctgaatgaagccataccaaacgacgagcgtgacaccacgatgcctgtagcaatggcaacaacgttgcgcaaactattaactggcgaactacttactctagcttcccggcaacaattaatagactggatggaggcggataaagttgcaggaccacttctgcgctcggcccttccggctggctggtttattgctgataaatctggagccggtgagcgtgggtctcgcggtatcattgcagcactggggccagatggtaagccctcccgtatcgtagttatctacacgacgg

SEQ ID NO: 877 - DNA, 8145 bp, Artificial Sequence
  Description of Artificial Sequence: Synthetic polynucleotide
gcttttagaaaaactcatcgagcatcaaatgaaactgcaatttattcatatcaggattatcaataccatatttttgaaaaagccgtttctgtaatgaaggagaaaactcaccgaggcagttccataggatggcaagatcctggtatcggtctgcgattccgactcgtccaacatcaatacaacctattattgtaaaacgacggccagtgagcgcgcgtaatacgactcactatagggcgaattggagctcccgcggtgcggccgctctagaactagtggatcccccgggctgcagcgaccaatgtggaattcgcccttggcacgtgcgaagttcctattctctaggaaagtataggaacttcgaggcttttgacttgagggggatccacgcgtttacgccccgccctgccactcatcgcagtactgttgtaattcattaagcattctgccgacatggaagccatcacaaacggcatgatgaacctgaatcgccagcggcatcagcaccttgtcgccttgcgtataatatttgcccatggtgaaaacgggggcgaagaagttgtccatattggccacgtttaaatcaaaactggtgaaactcacccagggattggctgagacgaaaaacatattctcaataaaccctttagggaaataggccaggttttcaccgtaacacgccacatcttgcgaatatatgtgtagaaactgccggaaatcgtcgtggtattcactccagagcgatgaaaacgtttcagtttgctcatggaaaacggtgtaacaagggtgaacactatcccatatcaccagctcaccgtctttcattgccatacggaattccggatgagcattcatcaggcgggcaagaatgtgaataaaggccggataaaacttgtgcttatttttctttacggtctttaaaaaggccgtaatatccagctgaacggtctggttataggtacattgagcaactgactgaaatgcctcaaaatgttctttacgatgccattgggatatatcaacggtggtatatccagtgatttttttctccattttagcttccttagctcctgaaaatctcgataactcaaaaaatacgcccggtagtgatcttatttcattatggtgaaagttggaacctcttacgaagttcctatactttctagagaataggaacttcgcacgtgccaagggcgaattccacagtggatatcaagcttatcgataccgtcgacctcgagggggggcccggtacccagcttttgttccctttagtgagggttaattgcgcgcttggcgtaatcatggtcatagctgtttccatcaggatattcttctaatacctggaacgctgtttttccggggatcgcagtggtgagtaaccatgcatcatcaggagtacggataaaatgcttgatggtcggaagtggcataaattccgtcagccagtttagtctgaccatctcatctgtaacatcattggcaacgctacctttgccatgtttcagaaacaactctggcgcatcgggcttcccatacaagcgatagattgtcgcacctgattgcccgacattatcgcgagcccatttatacccatataaatcagcatccatgttggaatttaatcgcggcctcgacgtttcccgttgaatatggctcatattcttcctttttcaatattattgaagcatttatcagggttattgtctcatgagcggatacatatttgaatgtatttagaaaaataaacaaataggggtcagtgttacaaccaattaaccaattctgaacattatcgcgagcccatttatacctgaatatggctcataacaccccttgtttgcctggcggcagtagcgcggtggtcccacctgaccccatgccgaactcagaagtgaaacgccgtagcgccgatggtagtgtggggactccccatgcgagagtagggaactgccaggcatcaaataaaacgaaaggctcagtcgaaagactgggcctttcgcccgggctaattagggggtgtcgcccttattcgactctatagggaagttcctattctctagaaagtataggaacttctgaaggggggacagctgtctcaaatgtctcggaatcgctgacgattcccaggtttctccggcaagcatagcgcatggcgtctccatgcgagaatgtcgcgcttgccggataaaaggggagccgctatcggaatggacgcaagccacggccgcagcaggtgcggtcgagggcttccagccagttccagggcagatgtgccggcagaccctcccgctttgggggaggcgcaagccgggtccattcggatagcatctccccatgcaaagtgccggccagggcaatgcccggagccggttcgaggcgccggtttgaataaatgacaaaaagcaaagcctttgtgccgatgaatctctatactgtttcacagacctgctgccctgcggggcggccatcttcctttattcgcttataagcgcggggcaggaggaaaaacatgtccctgaacttcctggacttcgagcagccgattgcagaactggaagcgaagattgacagcctgaccgcggttagccgtcaagatgagaaactggacattaacatcgacgaagaggtccaccgtttgcgtgagaagtctgttgaactgactcgcaaaatctttgctgatttgggcgcatggcagattgcccagttggctcgccacccacaacgcccatataccctggactacgtgcgcctggcgtttgacgagttcgacgaactggcaggcgaccgcgcctatgcggacgataaagcaattgtcggcggtattgctcgtttggatggccgtccggtgatgattatcggccatcaaaaaggccgcgagacgaaagaaaagattcgtcgtaactttggtatgccggcaccggagggctaccgcaaggccctgcgtctgatgcaaatggccgaacgctttaagatgccgattatcacgttcattgatacgccgggtgcgtacccaggcgttggtgcggaagagcgtggtcagagcgaggccatcgcacgtaacctgcgtgagatgtctcgtctgggtgtgccggtcgtttgcaccgtgattggcgagggcggtagcggtggtgcgttggcgatcggtgtcggtgataaggtcaacatgctgcaatacagcacgtacagcgtcattagcccggaaggttgcgcttccattctgtggaagagcgcggataaagcaccattggcagcggaagcgatgggtatcatcgcaccgcgtctgaaagaactgaagttgattgattctatcatcccggaaccgctgggcggtgctcaccgtaatccggaggcgatggcagccagcctgaaggcccagctgctggcggacctggcggatctggacgtgctgagcacggaggatctgaaaaaccgtcgctatcagcgcttgatgagctatggctacgcgtagtaaaggaggaaaatcatgagctggattgaacgcattaagtccaatatcaccccgacccgcaaggcgagcatccctgaaggcgtctggaccaaatgcgatagctgcggtcaggttttgtatcgtgcggagctggagcgtaacctggaagtgtgcccgaaatgcgaccatcacatgcgtatgaccgctcgtaatcgtctgcatagcctgctggatgagggcagcctggtcgagctgggtagcgaactggaaccgaaagatgttctgaaattccgtgattccaagaagtataaggatcgtttggcatctgcacaaaaagaaaccggtgagaaggacgcactggttgttatgaaaggcaccctgtatggtatgccggttgttgctgcggcgttcgagtttgcgtttatgggtggcagcatgggttccgtggtgggcgcacgctttgtgcgtgccgtggagcaggcgctggaggataactgtcctctgatttgtttcagcgcgagcggtggtgcgcgtatgcaagaggccctgatgagcctgatgcagatggcaaaaacctcggcagccctggcgaagatgcaagaacgcggcctgccgtacatttccgtcctgaccgaccctacgatgggcggtgtcagcgccagctttgcgatgctgggtgatttgaacatcgcagagccgaaggctctgattggttttgctggtccgcgtgttattgaacagacggttcgcgaaaagttgccgcctggtttccagcgcagcgagttcctgattgagaaaggtgccatcgacatgatcgttcgccgtccagaaatgcgtctgaaactggcgagcattctggcgaaattgatgaatctgccggctccgaatcctgaagcaccgcgtgagggtgtcgtggttccgccggtcccggaccaagagccggaggcataatagcacgtggagttaaccacgcggcttgccaacggggtctgaatcgctttttttgtatataatgcgtgtgaaatttcataccacaggcgaaggaggaaaaaccatggacattcgtaagatcaagaaactgattgaactggttgaagaaagcggcatcagcgagctggagatcagcgaaggtgaagagagcgtccgtatttcccgtgcggcaccggcagcgagctttccggttatgcagcaagcatacgccgctccgatgatgcaacagccggcacagagcaacgccgctgcaccggcgaccgttccaagcatggaggcaccggcagcggccgagatttcgggtcatatcgtgcgtagcccgatggtgggcaccttctatcgcacgccgtcgccggacgcaaaagccttcatcgaagtcggccagaaggtcaatgtcggcgacacgctgtgtatcgttgaggcaatgaaaatgatgaaccagattgaagcggataagagcggtactgttaaagcgatcctggtggaatccggccagcctgttgagttcgatgaaccgctggttgtgatcgagtaacgaggcgaacatgttggacaagatcgtgattgcaaaccgcggtgaaatcgcgctgcgtatcttgcgcgcgtgtaaagagctgggcattaagactgttgccgtgcattccagcgcagaccgcgacctgaagcatgttctgctggccgacgaaacggtttgcatcggtccggcaccgagcgtgaaaagctatctgaacatcccggccatcatctctgcggcagagatcaccggtgcagtggcgattcatccgggctacggtttcctgagcgagaacgctaactttgctgaacaagtggagcgtagcggtttcatcttcattggccctaaggcggagacgattcgcctgatgggcgacaaagtgagcgccattgcagcgatgaaaaaggccggtgtgccgtgtgttccgggcagcgatggtccgctgggtgacgatatggacaagaaccgtgccatcgctaaacgtattggctacccggtcattatcaaagcctctggtggtggcggtggccgtggtatgcgtgtcgtccgtggtgatgcggaactggcgcaaagcatcagcatgacccgtgcggaagccaaagcggcgttctctaacgatatggtgtatatggagaagtatctggagaatccgcgccacgttgaaatccaagttctggcggatggtcagggcaatgcgatctacttggcagaacgtgattgctccatgcaacgccgtcatcagaaggtggtggaagaggcaccggctccgggtattacgccggaactgcgtcgctacatcggtgagcgctgtgcgaaagcgtgtgtggacattggttaccgtggtgcgggtacgtttgagttcctgttcgaaaatggtgagttttacttcattgaaatgaatacccgcatccaggttgagcacccggtgaccgagatgattactggcgttgatctgatcaaagagcaactgcgcattgcggctggtcagccgctgtcgatcaagcaagaagaggtgcacgttcgtggtcacgcggtcgagtgccgtatcaatgcggaggacccgaatacctttctgccgagccctggtaagatcacgcgttttcacgcgccaggtggttttggcgttcgttgggagtctcacatctacgccggttacaccgtgccgccgtactatgacagcatgattggtaaactgatctgctatggcgaaaatcgtgatgtcgcgatcgcccgcatgaaaaacgcgctgcaagagctgatcattgatggcattaagaccaatgtggatttgcagatccgcattatgaacgacgagaatttccagcacggcggtacgaacattcactacctggaaaagaaactgggcctgcaagagaaataatagggtaccctagcataaccccttggggcctctaaacgggtcttgaggggttttttgaatcccccgggatgtctatcttaaggtagccaaagtttaaactttggctaccttaagatagacatactgccggcctggttcaaccagtcggcagccggcgctggcgcccgcgtattgcggtgcagccagcgcggcgcacaaggcggcgggcgtttcgtttcgccgcccgtttcgcgggccgtcaaggcccgcgaatcgtttctgcccgcgcggcattcctcgctttttgcgccaattcaccgggttttccttaagccccgtcgcttttcttagtgccttgttgggcatagaatcagggcagcggcgcagccagcaccatgttcgtgcagcgcggccctcgcgggggcgaggctgcagacagctgtcaaaatgaagggaagttcctatactttctagagaataggaacttctatagggagtcgaataagggcgacacaaaaggtattctaaatgcataataaatactgataacatcttatagtttgtattatattttgtattatcgttgacatgtataattttgatatcaaaaactgattttccctttattattttcgagatttattttcttaattctctttaacaaactagaaatattgtatatacaaaaaatcataaataatagatgaatagtttaattataggtgttcatcaatcgaaaaagcaacgtatcttatttaaagtgcgttgcttttttctcatttataaggttaaataattctcatatatcaagcaaagtgacaggcgcccttaaatattctgacaaatgctctttccctaaactccccccataaaaaaacccgccgaagcgggtttttacgttatttgcggattaacgattactcgttatcagaaccgcccaggatgcctggcagttccctactctcgccgctgcgctcggtcgttcggctgcgggacctcagcgctagcggagtgtatactggcttactatgttggcactgatgagggtgtcagtgaagtgcttcatgtggcaggagaaaaaaggctgcaccggtgcgtcagcagaatatgtgatacaggatatattccgcttcctcgctcactgactcgctacgctcggtcgttcgactgcggcgagcggaaatggcttacgaacggggcggagatttcctggaagatgccaggaagatacttaacagggaagtgagagggccgcggcaaagccgtttttccataggctccgcccccctgacaagcatcacgaaatctgacgctcaaatcagtggtggcgaaacccgacaggactataaagataccaggcgtttccccctggcggctccctcgtgcgctctcctgttcctgcctttcggtttaccggtgtcattccgctgttatggccgcgtttgtctcattccacgcctgacactcagttccgggtaggcagttcgctccaagctggactgtatgcacgaaccccccgttcagtccgaccgctgcgccttatccggtaactatcgtcttgagtccaacccggaaagacatgcaaaagcaccactggcagcagccactggtaattgatttagaggagttagtcttgaagtcatgcgccggttaaggctaaactgaaaggacaagttttggtgactgcgctcctccaagccagttacctcggttcaaagagttggtagctcagagaaccttcgaaaaaccgccctgcaaggcggttttttcgttttcagagcaagagattacgcgcagaccaaaacgatctcaagaagatcatcttattaa

SEQ ID NO: 878 - DNA, 6915 bp, Artificial Sequence
  Description of Artificial Sequence: Synthetic polynucleotide
gaattccggatgagcattcatcaggcgggcaagaatgtgaataaaggccggataaaacttgtgcttatttttctttacggtctttaaaaaggccgtaatatccagctgaacggtctggttataggtacattgagcaactgactgaaatgcctcaaaatgttctttacgatgccattgggatatatcaacggtggtatatccagtgatttttttctccattttagcttccttagctcctgaaaatctcgataactcaaaaaatacgcccggtagtgatcttatttcattatggtgaaagttggaacctcttacgtgccgatcaacgtctcattttcgccaaaagttggcccagggcttcccggtatcaacagggacaccaggatttatttattctgcgaagtgatcttccgtcacaggtatttattcggcgcaaagtgcgtcgggtgatgctgccaacttactgatttagtgtatgatggtgtttttgaggtgctccagtggcttctgtttctatcagctgtccctcctgttcagctactgacggggtggtgcgtaacggcaaaagcaccgccggacatcagcgctagcggagtgtatactggcttactatgttggcactgatgagggtgtcagtgaagtgcttcatgtggcaggagaaaaaaggctgcaccggtgcgtcagcagaatatgtgatacaggatatattccgcttcctcgctcactgactcgctacgctcggtcgttcgactgcggcgagcggaaatggcttacgaacggggcggagatttcctggaagatgccaggaagatacttaacagggaagtgagagggccgcggcaaagccgtttttccataggctccgcccccctgacaagcatcacgaaatctgacgctcaaatcagtggtggcgaaacccgacaggactataaagataccaggcgtttccccctggcggctccctcgtgcgctctcctgttcctgcctttcggtttaccggtgtcattccgctgttatggccgcgtttgtctcattccacgcctgacactcagttccgggtaggcagttcgctccaagctggactgtatgcacgaaccccccgttcagtccgaccgctgcgccttatccggtaactatcgtcttgagtccaacccggaaagacatgcaaaagcaccactggcagcagccactggtaattgatttagaggagttagtcttgaagtcatgcgccggttaaggctaaactgaaaggacaagttttggtgactgcgctcctccaagccagttacctcggttcaaagagttggtagctcagagaaccttcgaaaaaccgccctgcaaggcggttttttcgttttcagagcaagagattacgcgcagaccaaaacgatctcaagaagatcatcttattaatcagataaaatatttctagatttcagtgcaatttatctcttcaaatgtagcacctgaagtcagccccatacgatataagttgtaattctcatgtttgacagcttatcatcgataagctttaatgcggtagtttatcacagttaaattgctaacgcagtcaggcaccgtgtatgaaatctaacaatgcgctcatcgtcatcctcggcaccgtcaccctggatgctgtaggcataggcttggttatgccggtactgccgggcctcttgcgggatttaagctcgggccccctgggcggttctgataacgagtaatcgttaatccgcaaataacgtaaaaacccgcttcggcgggtttttttatggggggagtttagggaaagagcatttgtcagaatatttaagggcgcctgtcactttgcttgatatatgagaattatttaaccttataaatgagaaaaaagcaacgcactttaaataagatacgttgctttttcgattgatgaacacctataattaaactattcatctattatttatgattttttgtatatacaatatttctagtttgttaaagagaattaagaaaataaatctcgaaaataataaagggaaaatcagtttttgatgggttacagagctttcaggattgcatccacgctggctttggcgtcaccaaacagcatgtgggtgttttccttgaagaacagcgggttttgcacaccagcatagccagtgttcatcgaacgtttaaagacaatcacgttctgcgctttccacacttccagcacaggcataccagcaatcggactcttcggatcatcctgcgccgccgggttaaccgtatcgttagcaccaatcaccagtacggtatcggtatcagcaaagtcatcattgatctcgtccatttccagcacgatgtcatacggtacttttgcttcagccagcaatacgttcatatgtccaggcaaacgccccgcgaccgggtggataccgaaacgcacattaataccacgagcgcgcaatttctcagtaatttcagcgacaggatattgcgcctgcgcgactgccatgccgtaccccggagtaatgatcactgaatgggagtttttcagcagttccgctgtctcttctgcggtgatttcgcggtgctcacccacttcctgatcatcgccagtagaagagccgtcggtgccgaaaccacccgcaataacgctgataaaggaacggttcatcgcctcacacataatgtaagaaaggatagcccccgaagaaccgaccagcgcaccggtcacaatcagcaggtcgttgctgagcataaagcccgcagccgcagccgcccagccggagtacgagttcagcatcgacaccaccactggcatatctgcaccaccgatggaggcgactaaatgccagccgaataccagcgcaattgcggtcattatcagcaatgccagcacttgcaggccgacgctgtccgtgcgaacaaatacaatcagcagcaggaaggaaacgaccagagccgccaggttcattttgtgacggtttggcagcatcaatggtttagacgaaatcttgccacacagtttgccgaacgccaccaccgaacccgtgaacgttaccgccccgatgaagataccgaggaacacttccgtcaggtgaatattgaccagaatcggtgccattcccgcgtcatgatgcagatagctgttaaagccaaccagcactgccgccagacccacgaagctatgcaggatcgccaccagttctggcatttcggtcatttcaactttcttcgccagacggataccaattgccccaccaatgaccatcgccagcaagatccagccaacattacccgtatccggtccaaaaatggttgcgattaacgcaatcgccatcccggcgataccgaagttgttaccctggcgagacgtttcatgtttcgaaagaccggccagactgaagataaacaggatcgcggcaacaatgtatgcagctgtaactaatcctccagacatatgttaccccttaatttttgcggaacattttcagcatgcgctgagtcacggtgaagccaccgaaaatattaatgctggctataagcaccgcgataaaactaaggaagctaacccagccgccctggccaatctgcaacagtgctccgacaacaataatccctgaaatcgcgttggtgaccgacatcaacggtgtatgcagcgcgtgcgatacattccacaccacgtaataaccgacaacgcaggccagcgcgaaaacggtgaagtgcccaaggaattctttcggcgcaacgcttgccatccagccaaaaagaatgattgccagcgccatcaacgcgtatttacgccacggtgagcaggtacatttttcctcagttttcacttccggtgccgctttttgtgccgcctgcggctgagctgatacctgaatcggcggtgccggccaggtaatttcgcccgcacggatcacggtcacgccgcgaatcaccacatcatcaaaatcaacagtgatattgccgtctttctctttgcacaacagtttcagcagattaacgaggtttgtgccgtaaagctgtgaggattgcgtcggcagacggcccggaagatcggtataaccaatcactttgacaccattttccgtagtgaagatttcacccggcacggtgtattcacagttgccgccgttttgggctgccaggtcgacaatcacactgcccgccttcatggagtcaaccatttcacgggtaattagcttcggcgctggtttgcctggaataagcgcggtggtgacaatgatatcgacctcttttgcctgggcggcaaagagttccatttccgctttgatgaacgcgtccgacatcactttggcatagccatcgccgctgccagcttcctctttaaaatccagctcgaggaattccgcgcccatactttgaacttgttctttcacttccgggcgggtgtcgaatgcacgcacaatcgcgccgagactgtttgctgcgccaatggcggccagacctgcaacacccgcaccaatcaccatcacttttgccggtggcactttcccggccgcagtaatttgcccggtaaagaagcgcccaaattcatgtgccgcttcaacaatggcgcgataaccggcgatgttcgccatcgagcttagtgcgtccagcgattgtgcgcgtgagatacgcggcacagagtccatcgccatcacggtcacgttacgttccgcaagtttttgcattaattccggattctgcgcaggccagataaaactcaccagcgttgtcccaggattcagtaacgcaatttcatcatctaacggcgcattgaccttcagaatgatctctgactgccagacgctattcccttctacaatttcagcgcccgcttgcacaaacgctttatcgtcaaaacttgccagttgacccgcgccgctctctaccgcgacggtaaaacccagtttcagcagctgttccactgtttttggcgttgctgcaacacgggtttcattggttaaccgttctcttggtatgccaattgccatggtaaatactccttgaaaagtaaagtgttagatgagtgcgttaattcacacttctgagaaatttcgctaaacgcatcaaaaaagcatagcagacaggcatggtattgctggattaagcaggtaacatcagtgttataggattattaccaaaacattatattcacaggtgtatcgctcaatactgaccatttaaatcatacctgacctccatagcagaaagtcaaaagcctccgaccggaggcttttgacttgagggggatcagcttctattatttctcttgcaggcccagtttcttttccaggtagtgaatgttcgtaccgccgtgctggaaattctcgtcgttcataatgcggatctgcaaatccacattggtcttaatgccatcaatgatcagctcttgcagcgcgtttttcatgcgggcgatcgcatgtttttcctcctgccccgcgcttataagcgaataaaggaagatggccgccccgcagggcagcaggtctgtgaaacagtatagagattcatcggcacaaaggctttgctttttgtcatttattcaaaccggcgcctcgaaccggctccgggcattgccctggccggcactttgcatggggagatgcggatctcgggcagcgttgggtcctggccacgggtgcgcatgatcgtgctcctgtcgttgaggacccggctaggctggcggggttgccttactggttagcagaatgaatcaccgatacgcgagcgaacgtgaagcgactgctgctgcaaaacgtctgcgacctgagcaacaacatgaatggtcttcggtttccgtgtttcgtaaagtctggaaacgcggaagtcccctacgtgctgctgaagttgcccgcaacagagagtggaaccaaccggtgataccacgatactatgactgagagtcaacgccatgagcggcctcatttcttattctgagttacaacagtccgcaccgctgtccggtagctccttccggtgggcgcggggcatgactatcgtcgccgcacttatgactgtcttctttatcatgcaactcgtaggacaggtgccggcagcgcccaacagtcccccggccacggggcctgccaccatacccacgccgaaacaagcgccctgcaccattatgttccggatctgcatcgcaggatgctgctggctaccctgtggaacacctacatctgtattaacgaagcgctaaccgtttttatcaggctctgggaggcagaataaatgatcatatcgtcaattattacctccacggggagagcctgagcaaactggcctcaggcatttgagaagcacacggtcacactgcttccggtagtcaataaaccggtaaaccagcaatagacataagcggctatttaacgaccctgccctgaaccgacgaccgggtcgaatttgctttcgaatttctgccattcatccgcttattatcacttattcaggcgtagcaccaggcgtttaagggcaccaataactgccttaaaaaaattacgccccgccctgccactcatcgcagtactgttgtaattcattaagcattctgccgacatggaagccatcacagacggcatgatgaacctgaatcgccagcggcatcagcaccttgtcgccttgcgtataatatttgcccatggtgaaaacgggggcgaagaagttgtccatattggccacgtttaaatcaaaactggtgaaactcacccagggattggctgagacgaaaaacatattctcaataaaccctttagggaaataggccaggttttcaccgtaacacgccacatcttgcgaatatatgtgtagaaactgccggaaatcgtcgtggtattcactccagagcgatgaaaacgtttcagtttgctcatggaaaacggtgtaacaagggtgaacactatcccatatcaccagctcaccgtctttcattgccatacg

SEQ ID NO: 879 - DNA, 10578 bp, Artificial Sequence
  Description of Artificial Sequence: Synthetic polynucleotide
gaattccggatgagcattcatcaggcgggcaagaatgtgaataaaggccggataaaacttgtgcttatttttctttacggtctttaaaaaggccgtaatatccagctgaacggtctggttataggtacattgagcaactgactgaaatgcctcaaaatgttctttacgatgccattgggatatatcaacggtggtatatccagtgatttttttctccattttagcttccttagctcctgaaaatctcgataactcaaaaaatacgcccggtagtgatcttatttcattatggtgaaagttggaacctcttacgtgccgatcaacgtctcattttcgccaaaagttggcccagggcttcccggtatcaacagggacaccaggatttatttattctgcgaagtgatcttccgtcacaggtatttattcggcgcaaagtgcgtcgggtgatgctgccaacttactgatttagtgtatgatggtgtttttgaggtgctccagtggcttctgtttctatcagctgtccctcctgttcagctactgacggggtggtgcgtaacggcaaaagcaccgccggacatcagcgctagcggagtgtatactggcttactatgttggcactgatgagggtgtcagtgaagtgcttcatgtggcaggagaaaaaaggctgcaccggtgcgtcagcagaatatgtgatacaggatatattccgcttcctcgctcactgactcgctacgctcggtcgttcgactgcggcgagcggaaatggcttacgaacggggcggagatttcctggaagatgccaggaagatacttaacagggaagtgagagggccgcggcaaagccgtttttccataggctccgcccccctgacaagcatcacgaaatctgacgctcaaatcagtggtggcgaaacccgacaggactataaagataccaggcgtttccccctggcggctccctcgtgcgctctcctgttcctgcctttcggtttaccggtgtcattccgctgttatggccgcgtttgtctcattccacgcctgacactcagttccgggtaggcagttcgctccaagctggactgtatgcacgaaccccccgttcagtccgaccgctgcgccttatccggtaactatcgtcttgagtccaacccggaaagacatgcaaaagcaccactggcagcagccactggtaattgatttagaggagttagtcttgaagtcatgcgccggttaaggctaaactgaaaggacaagttttggtgactgcgctcctccaagccagttacctcggttcaaagagttggtagctcagagaaccttcgaaaaaccgccctgcaaggcggttttttcgttttcagagcaagagattacgcgcagaccaaaacgatctcaagaagatcatcttattaatcagataaaatatttctagatttcagtgcaatttatctcttcaaatgtagcacctgaagtcagccccatacgatataagttgtaattctcatgtttgacagcttatcatcgataagctttaatgcggtagtttatcacagttaaattgctaacgcagtcaggcaccgtgtatgaaatctaacaatgcgctcatcgtcatcctcggcaccgtcaccctggatgctgtaggcataggcttggttatgccggtactgccgggcctcttgcgggatttaagctcgggccccctgggcggttctgataacgagtaatcgttaatccgcaaataacgtaaaaacccgcttcggcgggtttttttatggggggagtttagggaaagagcatttgtcagaatatttaagggcgcctgtcactttgcttgatatatgagaattatttaaccttataaatgagaaaaaagcaacgcactttaaataagatacgttgctttttcgattgatgaacacctataattaaactattcatctattatttatgattttttgtatatacaatatttctagtttgttaaagagaattaagaaaataaatctcgaaaataataaagggaaaatcagtttttgatgggttacagagctttcaggattgcatccacgctggctttggcgtcaccaaacagcatgtgggtgttttccttgaagaacagcgggttttgcacaccagcatagccagtgttcatcgaacgtttaaagacaatcacgttctgcgctttccacacttccagcacaggcataccagcaatcggactcttcggatcatcctgcgccgccgggttaaccgtatcgttagcaccaatcaccagtacggtatcggtatcagcaaagtcatcattgatctcgtccatttccagcacgatgtcatacggtacttttgcttcagccagcaatacgttcatatgtccaggcaaacgccccgcgaccgggtggataccgaaacgcacattaataccacgagcgcgcaatttctcagtaatttcagcgacaggatattgcgcctgcgcgactgccatgccgtaccccggagtaatgatcactgaatgggagtttttcagcagttccgctgtctcttctgcggtgatttcgcggtgctcacccacttcctgatcatcgccagtagaagagccgtcggtgccgaaaccacccgcaataacgctgataaaggaacggttcatcgcctcacacataatgtaagaaaggatagcccccgaagaaccgaccagcgcaccggtcacaatcagcaggtcgttgctgagcataaagcccgcagccgcagccgcccagccggagtacgagttcagcatcgacaccaccactggcatatctgcaccaccgatggaggcgactaaatgccagccgaataccagcgcaattgcggtcattatcagcaatgccagcacttgcaggccgacgctgtccgtgcgaacaaatacaatcagcagcaggaaggaaacgaccagagccgccaggttcattttgtgacggtttggcagcatcaatggtttagacgaaatcttgccacacagtttgccgaacgccaccaccgaacccgtgaacgttaccgccccgatgaagataccgaggaacacttccgtcaggtgaatattgaccagaatcggtgccattcccgcgtcatgatgcagatagctgttaaagccaaccagcactgccgccagacccacgaagctatgcaggatcgccaccagttctggcatttcggtcatttcaactttcttcgccagacggataccaattgccccaccaatgaccatcgccagcaagatccagccaacattacccgtatccggtccaaaaatggttgcgattaacgcaatcgccatcccggcgataccgaagttgttaccctggcgagacgtttcatgtttcgaaagaccggccagactgaagataaacaggatcgcggcaacaatgtatgcagctgtaactaatcctccagacatatgttaccccttaatttttgcggaacattttcagcatgcgctgagtcacggtgaagccaccgaaaatattaatgctggctataagcaccgcgataaaactaaggaagctaacccagccgccctggccaatctgcaacagtgctccgacaacaataatccctgaaatcgcgttggtgaccgacatcaacggtgtatgcagcgcgtgcgatacattccacaccacgtaataaccgacaacgcaggccagcgcgaaaacggtgaagtgcccaaggaattctttcggcgcaacgcttgccatccagccaaaaagaatgattgccagcgccatcaacgcgtatttacgccacggtgagcaggtacatttttcctcagttttcacttccggtgccgctttttgtgccgcctgcggctgagctgatacctgaatcggcggtgccggccaggtaatttcgcccgcacggatcacggtcacgccgcgaatcaccacatcatcaaaatcaacagtgatattgccgtctttctctttgcacaacagtttcagcagattaacgaggtttgtgccgtaaagctgtgaggattgcgtcggcagacggcccggaagatcggtataaccaatcactttgacaccattttccgtagtgaagatttcacccggcacggtgtattcacagttgccgccgttttgggctgccaggtcgacaatcacactgcccgccttcatggagtcaaccatttcacgggtaattagcttcggcgctggtttgcctggaataagcgcggtggtgacaatgatatcgacctcttttgcctgggcggcaaagagttccatttccgctttgatgaacgcgtccgacatcactttggcatagccatcgccgctgccagcttcctctttaaaatccagctcgaggaattccgcgcccatactttgaacttgttctttcacttccgggcgggtgtcgaatgcacgcacaatcgcgccgagactgtttgctgcgccaatggcggccagacctgcaacacccgcaccaatcaccatcacttttgccggtggcactttcccggccgcagtaatttgcccggtaaagaagcgcccaaattcatgtgccgcttcaacaatggcgcgataaccggcgatgttcgccatcgagcttagtgcgtccagcgattgtgcgcgtgagatacgcggcacagagtccatcgccatcacggtcacgttacgttccgcaagtttttgcattaattccggattctgcgcaggccagataaaactcaccagcgttgtcccaggattcagtaacgcaatttcatcatctaacggcgcattgaccttcagaatgatctctgactgccagacgctattcccttctacaatttcagcgcccgcttgcacaaacgctttatcgtcaaaacttgccagttgacccgcgccgctctctaccgcgacggtaaaacccagtttcagcagctgttccactgtttttggcgttgctgcaacacgggtttcattggttaaccgttctcttggtatgccaattgccatggtaaatactccttgaaaagtaaagtgttagatgagtgcgttaattcacacttctgagaaatttcgctaaacgcatcaaaaaagcatagcagacaggcatggtattgctggattaagcaggtaacatcagtgttataggattattaccaaaacattatattcacaggtgtatcgctcaatactgaccatttaaatcatacctgacctccatagcagaaagtcaaaagcctccgaccggaggcttttgacttgagggggatcagcttctattatttctcttgcaggcccagtttcttttccaggtagtgaatgttcgtaccgccgtgctggaaattctcgtcgttcataatgcggatctgcaaatccacattggtcttaatgccatcaatgatcagctcttgcagcgcgtttttcatgcgggcgatcgcgacatcacgattttcgccatagcagatcagtttaccaatcatgctgtcatagtacggcggcacggtgtaaccggcgtagatgtgagactcccaacgaacgccaaaaccacctggcgcgtgaaaacgcgtgatcttaccagggctcggcagaaaggtattcgggtcctccgcattgatacggcactcgaccgcgtgaccacgaacgtgcacctcttcttgcttgatcgacagcggctgaccagccgcaatgcgcagttgctctttgatcagatcaacgccagtaatcatctcggtcaccgggtgctcaacctggatgcgggtattcatttcaatgaagtaaaactcaccattttcgaacaggaactcaaacgtacccgcaccacggtaaccaatgtccacacacgctttcgcacagcgctcaccgatgtagcgacgcagttccggcgtaatacccggagccggtgcctcttccaccaccttctgatgacggcgttgcatggagcaatcacgttctgccaagtagatcgcattgccctgaccatccgccagaacttggatttcaacgtggcgcggattctccagatacttctccatatacaccatatcgttagagaacgccgctttggcttccgcacgggtcatgctgatgctttgcgccagttccgcatcaccacggacgacacgcataccacggccaccgccaccaccagaggctttgataatgaccgggtagccaatacgtttagcgatggcacggttcttgtccatatcgtcacccagcggaccatcgctgcccggaacacacggcacaccggcctttttcatcgctgcaatggcgctcactttgtcgcccatcaggcgaatcgtctccgccttagggccaatgaagatgaaaccgctacgctccacttgttcagcaaagttagcgttctcgctcaggaaaccgtagcccggatgaatcgccactgcaccggtgatctctgccgcagagatgatggccgggatgttcagatagcttttcacgctcggtgccggaccgatgcaaaccgtttcgtcggccagcagaacatgcttcaggtcgcggtctgcgctggaatgcacggcaacagtcttaatgcccagctctttacacgcgcgcaagatacgcagcgcgatttcaccgcggtttgcaatcacgatcttgtccaacatgttcgcctcgttactcgatcacaaccagcggttcatcgaactcaacaggctggccggattccaccaggatcgctttaacagtaccgctcttatccgcttcaatctggttcatcattttcattgcctcaacgatacacagcgtgtcgccgacattgaccttctggccgacttcgatgaaggcttttgcgtccggcgacggcgtgcgatagaaggtgcccaccatcgggctacgcacgatatgacccgaaatctcggccgctgccggtgcctccatgcttggaacggtcgccggtgcagcggcgttgctctgtgccggctgttgcatcatcggagcggcgtatgcttgctgcataaccggaaagctcgctgccggtgccgcacgggaaatacggacgctctcttcaccttcgctgatctccagctcgctgatgccgctttcttcaaccagttcaatcagtttcttgatcttacgaatgtccatggtttttcctccttcgcctgtggtatgaaatttcacacgcattatatacaaaaaaagcgattcagaccccgttggcaagccgcgtggttaactccacgtgctattatgcctccggctcttggtccgggaccggcggaaccacgacaccctcacgcggtgcttcaggattcggagccggcagattcatcaatttcgccagaatgctcgccagtttcagacgcatttctggacggcgaacgatcatgtcgatggcacctttctcaatcaggaactcgctgcgctggaaaccaggcggcaacttttcgcgaaccgtctgttcaataacacgcggaccagcaaaaccaatcagagccttcggctctgcgatgttcaaatcacccagcatcgcaaagctggcgctgacaccgcccatcgtagggtcggtcaggacggaaatgtacggcaggccgcgttcttgcatcttcgccagggctgccgaggtttttgccatctgcatcaggctcatcagggcctcttgcatacgcgcaccaccgctcgcgctgaaacaaatcagaggacagttatcctccagcgcctgctccacggcacgcacaaagcgtgcgcccaccacggaacccatgctgccacccataaacgcaaactcgaacgccgcagcaacaaccggcataccatacagggtgcctttcataacaaccagtgcgtccttctcaccggtttctttttgtgcagatgccaaacgatccttatacttcttggaatcacggaatttcagaacatctttcggttccagttcgctacccagctcgaccaggctgccctcatccagcaggctatgcagacgattacgagcggtcatacgcatgtgatggtcgcatttcgggcacacttccaggttacgctccagctccgcacgatacaaaacctgaccgcagctatcgcatttggtccagacgccttcagggatgctcgccttgcgggtcggggtgatattggacttaatgcgttcaatccagctcatgattttcctcctttactacgcgtagccatagctcatcaagcgctgatagcgacggtttttcagatcctccgtgctcagcacgtccagatccgccaggtccgccagcagctgggccttcaggctggctgccatcgcctccggattacggtgagcaccgcccagcggttccgggatgatagaatcaatcaacttcagttctttcagacgcggtgcgatgatacccatcgcttccgctgccaatggtgctttatccgcgctcttccacagaatggaagcgcaaccttccgggctaatgacgctgtacgtgctgtattgcagcatgttgaccttatcaccgacaccgatcgccaacgcaccaccgctaccgccctcgccaatcacggtgcaaacgaccggcacacccagacgagacatctcacgcaggttacgtgcgatggcctcgctctgaccacgctcttccgcaccaacgcctgggtacgcacccggcgtatcaatgaacgtgataatcggcatcttaaagcgttcggccatttgcatcagacgcagggccttgcggtagccctccggtgccggcataccaaagttacgacgaatcttttctttcgtctcgcggcctttttgatggccgataatcatcaccggacggccatccaaacgagcaataccgccgacaattgctttatcgtccgcataggcgcggtcgcctgccagttcgtcgaactcgtcaaacgccaggcgcacgtagtccagggtatatgggcgttgtgggtggcgagccaactgggcaatctgccatgcgcccaaatcagcaaagattttgcgagtcagttcaacagacttctcacgcaaacggtggacctcttcgtcgatgttaatgtccagtttctcatcttgacggctaaccgcggtcaggctgtcaatcttcgcttccagttctgcaatcggctgctcgaagtccaggaagttcagggacatgtttttcctcctgccccgcgcttataagcgaataaaggaagatggccgccccgcagggcagcaggtctgtgaaacagtatagagattcatcggcacaaaggctttgctttttgtcatttattcaaaccggcgcctcgaaccggctccgggcattgccctggccggcactttgcatggggagatgcggatctcgggcagcgttgggtcctggccacgggtgcgcatgatcgtgctcctgtcgttgaggacccggctaggctggcggggttgccttactggttagcagaatgaatcaccgatacgcgagcgaacgtgaagcgactgctgctgcaaaacgtctgcgacctgagcaacaacatgaatggtcttcggtttccgtgtttcgtaaagtctggaaacgcggaagtcccctacgtgctgctgaagttgcccgcaacagagagtggaaccaaccggtgataccacgatactatgactgagagtcaacgccatgagcggcctcatttcttattctgagttacaacagtccgcaccgctgtccggtagctccttccggtgggcgcggggcatgactatcgtcgccgcacttatgactgtcttctttatcatgcaactcgtaggacaggtgccggcagcgcccaacagtcccccggccacggggcctgccaccatacccacgccgaaacaagcgccctgcaccattatgttccggatctgcatcgcaggatgctgctggctaccctgtggaacacctacatctgtattaacgaagcgctaaccgtttttatcaggctctgggaggcagaataaatgatcatatcgtcaattattacctccacggggagagcctgagcaaactggcctcaggcatttgagaagcacacggtcacactgcttccggtagtcaataaaccggtaaaccagcaatagacataagcggctatttaacgaccctgccctgaaccgacgaccgggtcgaatttgctttcgaatttctgccattcatccgcttattatcacttattcaggcgtagcaccaggcgtttaagggcaccaataactgccttaaaaaaattacgccccgccctgccactcatcgcagtactgttgtaattcattaagcattctgccgacatggaagccatcacagacggcatgatgaacctgaatcgccagcggcatcagcaccttgtcgccttgcgtataatatttgcccatggtgaaaacgggggcgaagaagttgtccatattggccacgtttaaatcaaaactggtgaaactcacccagggattggctgagacgaaaaacatattctcaataaaccctttagggaaataggccaggttttcaccgtaacacgccacatcttgcgaatatatgtgtagaaactgccggaaatcgtcgtggtattcactccagagcgatgaaaacgtttcagtttgctcatggaaaacggtgtaacaagggtgaacactatcccatatcaccagctcaccgtctttcattgccatacg

SEQ ID NO: 880 - DNA, 9047 bp, Artificial Sequence
  Description of Artificial Sequence: Synthetic polynucleotide
gaattccggatgagcattcatcaggcgggcaagaatgtgaataaaggccggataaaacttgtgcttatttttctttacggtctttaaaaaggccgtaatatccagctgaacggtctggttataggtacattgagcaactgactgaaatgcctcaaaatgttctttacgatgccattgggatatatcaacggtggtatatccagtgatttttttctccattttagcttccttagctcctgaaaatctcgataactcaaaaaatacgcccggtagtgatcttatttcattatggtgaaagttggaacctcttacgtgccgatcaacgtctcattttcgccaaaagttggcccagggcttcccggtatcaacagggacaccaggatttatttattctgcgaagtgatcttccgtcacaggtatttattcggcgcaaagtgcgtcgggtgatgctgccaacttactgatttagtgtatgatggtgtttttgaggtgctccagtggcttctgtttctatcagctgtccctcctgttcagctactgacggggtggtgcgtaacggcaaaagcaccgccggacatcagcgctagcggagtgtatactggcttactatgttggcactgatgagggtgtcagtgaagtgcttcatgtggcaggagaaaaaaggctgcaccggtgcgtcagcagaatatgtgatacaggatatattccgcttcctcgctcactgactcgctacgctcggtcgttcgactgcggcgagcggaaatggcttacgaacggggcggagatttcctggaagatgccaggaagatacttaacagggaagtgagagggccgcggcaaagccgtttttccataggctccgcccccctgacaagcatcacgaaatctgacgctcaaatcagtggtggcgaaacccgacaggactataaagataccaggcgtttccccctggcggctccctcgtgcgctctcctgttcctgcctttcggtttaccggtgtcattccgctgttatggccgcgtttgtctcattccacgcctgacactcagttccgggtaggcagttcgctccaagctggactgtatgcacgaaccccccgttcagtccgaccgctgcgccttatccggtaactatcgtcttgagtccaacccggaaagacatgcaaaagcaccactggcagcagccactggtaattgatttagaggagttagtcttgaagtcatgcgccggttaaggctaaactgaaaggacaagttttggtgactgcgctcctccaagccagttacctcggttcaaagagttggtagctcagagaaccttcgaaaaaccgccctgcaaggcggttttttcgttttcagagcaagagattacgcgcagaccaaaacgatctcaagaagatcatcttattaatcagataaaatatttctagatttcagtgcaatttatctcttcaaatgtagcacctgaagtcagccccatacgatataagttgtaattctcatgtttgacagcttatcatcgataagctttaatgcggtagtttatcacagttaaattgctaacgcagtcaggcaccgtgtatgaaatctaacaatgcgctcatcgtcatcctcggcaccgtcaccctggatgctgtaggcataggcttggttatgccggtactgccgggcctcttgcgggatttaagctcgggccccctgggcggttctgataacgagtaatcgttaatccgcaaataacgtaaaaacccgcttcggcgggtttttttatggggggagtttagggaaagagcatttgtcagaatatttaagggcgcctgtcactttgcttgatatatgagaattatttaaccttataaatgagaaaaaagcaacgcactttaaataagatacgttgctttttcgattgatgaacacctataattaaactattcatctattatttatgattttttgtatatacaatatttctagtttgttaaagagaattaagaaaataaatctcgaaaataataaagggaaaatcagtttttgatttaaaacaggcggtttaaaccgtttaacgcagctacccgataggcttccgccatcgtcgggtagttaaaggtggtgttgacgaagtactcaatagtgttgccgccacctttctgttccataatcgcctgaccgatatgaataatttcggcagcgcgctcgccaaagcagtgaatacccagaatctcttttgtttcccgatggaacaaaattttcagcgtgcccacgttcatgccgacgatttgtgcgcgtgccagatgtttaaactgggcgcggcccacttcatatggcactttcattgcggtcagctgctgttcggttttgcccacagagctgatttccgggatggtgtaaataccggtagggatatcttcaatcagatgtgcggtggcttcgccttttaccagcgcctgcgcggcaatgcgcccctggtcataggccgccgacgccaggctcggataaccaatcacgtcgcccaccgcgtaaacgtgtggctgtgcggtctgatacatgctgttgaccttcagctgtccgcggctgtcagtttctagcccaatgttctgtaacgccagcgaatcggtattaccggtgcgaccgttggcatagagcaggcagtcagctttcagttttttacccgacttcagatgcatgatcacaccatcgtcacagccttcgatcttctcgtactcttcgttgtgacgaatcactacgccactgttccagaagtgataggagagagaatctgacatctcttgatcgagaaatgccagcaggcgatcgcgggtgttgatcagatccacttttacatccataccgcggaagatcgacgcatattcacagccgatcactccagcaccatagataagtacatggcgcggttcgtggtgcatgctgagaattgagtcgctgtcgtaaatgcgtggatgggtgaaatcaacatctgttggatgatatggacgagagccgcaggcaataacaaatttttcagcggttagtgtttcaacgctgccgtccgggcaatccagcgccaacgtatgctcgtcaacaaagcgagcgtttccctgcaatatttcacagtgattacgttcgtaaaatccctgacgcatgcgcgtttgttgattaatcacgttatcggcatggttaaggatatcggcaaaagaagagcggagcagtcgggaatggtcgctgtaaagtgggttttgattgaattctataatgcggctgacggcgtgacggagagctttcgacgggatggtgccccagtgggtgcaaccgccgccaacattttgataacgctcgataactgcgacgcgcgcaccttgcttaaccaggcccattgcagcgccttcgccgccggggccggaacctattactatggcatcgtaatcgtaggaatgtggggccatggtaaatactccttgaaaagtaaagtgttagatgagtgcgttaattcacacttctgagaaatttcgctaaacgcatcaaaaaagcatagcagacaggcatggtattgctggattaagcaggtaacatcagtgttataggattattaccaaaacattatattcacaggtgtatcgctcaatactgaccatttaaatcatacctgacctccatagcagaaagtcaaaagcctccgaccggaggcttttgacttgagggggatcagcttctattatttctcttgcaggcccagtttcttttccaggtagtgaatgttcgtaccgccgtgctggaaattctcgtcgttcataatgcggatctgcaaatccacattggtcttaatgccatcaatgatcagctcttgcagcgcgtttttcatgcgggcgatcgcgacatcacgattttcgccatagcagatcagtttaccaatcatgctgtcatagtacggcggcacggtgtaaccggcgtagatgtgagactcccaacgaacgccaaaaccacctggcgcgtgaaaacgcgtgatcttaccagggctcggcagaaaggtattcgggtcctccgcattgatacggcactcgaccgcgtgaccacgaacgtgcacctcttcttgcttgatcgacagcggctgaccagccgcaatgcgcagttgctctttgatcagatcaacgccagtaatcatctcggtcaccgggtgctcaacctggatgcgggtattcatttcaatgaagtaaaactcaccattttcgaacaggaactcaaacgtacccgcaccacggtaaccaatgtccacacacgctttcgcacagcgctcaccgatgtagcgacgcagttccggcgtaatacccggagccggtgcctcttccaccaccttctgatgacggcgttgcatggagcaatcacgttctgccaagtagatcgcattgccctgaccatccgccagaacttggatttcaacgtggcgcggattctccagatacttctccatatacaccatatcgttagagaacgccgctttggcttccgcacgggtcatgctgatgctttgcgccagttccgcatcaccacggacgacacgcataccacggccaccgccaccaccagaggctttgataatgaccgggtagccaatacgtttagcgatggcacggttcttgtccatatcgtcacccagcggaccatcgctgcccggaacacacggcacaccggcctttttcatcgctgcaatggcgctcactttgtcgcccatcaggcgaatcgtctccgccttagggccaatgaagatgaaaccgctacgctccacttgttcagcaaagttagcgttctcgctcaggaaaccgtagcccggatgaatcgccactgcaccggtgatctctgccgcagagatgatggccgggatgttcagatagcttttcacgctcggtgccggaccgatgcaaaccgtttcgtcggccagcagaacatgcttcaggtcgcggtctgcgctggaatgcacggcaacagtcttaatgcccagctctttacacgcgcgcaagatacgcagcgcgatttcaccgcggtttgcaatcacgatcttgtccaacatgttcgcctcgttactcgatcacaaccagcggttcatcgaactcaacaggctggccggattccaccaggatcgctttaacagtaccgctcttatccgcttcaatctggttcatcattttcattgcctcaacgatacacagcgtgtcgccgacattgaccttctggccgacttcgatgaaggcttttgcgtccggcgacggcgtgcgatagaaggtgcccaccatcgggctacgcacgatatgacccgaaatctcggccgctgccggtgcctccatgcttggaacggtcgccggtgcagcggcgttgctctgtgccggctgttgcatcatcggagcggcgtatgcttgctgcataaccggaaagctcgctgccggtgccgcacgggaaatacggacgctctcttcaccttcgctgatctccagctcgctgatgccgctttcttcaaccagttcaatcagtttcttgatcttacgaatgtccatggtttttcctccttcgcctgtggtatgaaatttcacacgcattatatacaaaaaaagcgattcagaccccgttggcaagccgcgtggttaactccacgtgctattatgcctccggctcttggtccgggaccggcggaaccacgacaccctcacgcggtgcttcaggattcggagccggcagattcatcaatttcgccagaatgctcgccagtttcagacgcatttctggacggcgaacgatcatgtcgatggcacctttctcaatcaggaactcgctgcgctggaaaccaggcggcaacttttcgcgaaccgtctgttcaataacacgcggaccagcaaaaccaatcagagccttcggctctgcgatgttcaaatcacccagcatcgcaaagctggcgctgacaccgcccatcgtagggtcggtcaggacggaaatgtacggcaggccgcgttcttgcatcttcgccagggctgccgaggtttttgccatctgcatcaggctcatcagggcctcttgcatacgcgcaccaccgctcgcgctgaaacaaatcagaggacagttatcctccagcgcctgctccacggcacgcacaaagcgtgcgcccaccacggaacccatgctgccacccataaacgcaaactcgaacgccgcagcaacaaccggcataccatacagggtgcctttcataacaaccagtgcgtccttctcaccggtttctttttgtgcagatgccaaacgatccttatacttcttggaatcacggaatttcagaacatctttcggttccagttcgctacccagctcgaccaggctgccctcatccagcaggctatgcagacgattacgagcggtcatacgcatgtgatggtcgcatttcgggcacacttccaggttacgctccagctccgcacgatacaaaacctgaccgcagctatcgcatttggtccagacgccttcagggatgctcgccttgcgggtcggggtgatattggacttaatgcgttcaatccagctcatgattttcctcctttactacgcgtagccatagctcatcaagcgctgatagcgacggtttttcagatcctccgtgctcagcacgtccagatccgccaggtccgccagcagctgggccttcaggctggctgccatcgcctccggattacggtgagcaccgcccagcggttccgggatgatagaatcaatcaacttcagttctttcagacgcggtgcgatgatacccatcgcttccgctgccaatggtgctttatccgcgctcttccacagaatggaagcgcaaccttccgggctaatgacgctgtacgtgctgtattgcagcatgttgaccttatcaccgacaccgatcgccaacgcaccaccgctaccgccctcgccaatcacggtgcaaacgaccggcacacccagacgagacatctcacgcaggttacgtgcgatggcctcgctctgaccacgctcttccgcaccaacgcctgggtacgcacccggcgtatcaatgaacgtgataatcggcatcttaaagcgttcggccatttgcatcagacgcagggccttgcggtagccctccggtgccggcataccaaagttacgacgaatcttttctttcgtctcgcggcctttttgatggccgataatcatcaccggacggccatccaaacgagcaataccgccgacaattgctttatcgtccgcataggcgcggtcgcctgccagttcgtcgaactcgtcaaacgccaggcgcacgtagtccagggtatatgggcgttgtgggtggcgagccaactgggcaatctgccatgcgcccaaatcagcaaagattttgcgagtcagttcaacagacttctcacgcaaacggtggacctcttcgtcgatgttaatgtccagtttctcatcttgacggctaaccgcggtcaggctgtcaatcttcgcttccagttctgcaatcggctgctcgaagtccaggaagttcagggacatgtttttcctcctgccccgcgcttataagcgaataaaggaagatggccgccccgcagggcagcaggtctgtgaaacagtatagagattcatcggcacaaaggctttgctttttgtcatttattcaaaccggcgcctcgaaccggctccgggcattgccctggccggcactttgcatggggagatgcggatctcgggcagcgttgggtcctggccacgggtgcgcatgatcgtgctcctgtcgttgaggacccggctaggctggcggggttgccttactggttagcagaatgaatcaccgatacgcgagcgaacgtgaagcgactgctgctgcaaaacgtctgcgacctgagcaacaacatgaatggtcttcggtttccgtgtttcgtaaagtctggaaacgcggaagtcccctacgtgctgctgaagttgcccgcaacagagagtggaaccaaccggtgataccacgatactatgactgagagtcaacgccatgagcggcctcatttcttattctgagttacaacagtccgcaccgctgtccggtagctccttccggtgggcgcggggcatgactatcgtcgccgcacttatgactgtcttctttatcatgcaactcgtaggacaggtgccggcagcgcccaacagtcccccggccacggggcctgccaccatacccacgccgaaacaagcgccctgcaccattatgttccggatctgcatcgcaggatgctgctggctaccctgtggaacacctacatctgtattaacgaagcgctaaccgtttttatcaggctctgggaggcagaataaatgatcatatcgtcaattattacctccacggggagagcctgagcaaactggcctcaggcatttgagaagcacacggtcacactgcttccggtagtcaataaaccggtaaaccagcaatagacataagcggctatttaacgaccctgccctgaaccgacgaccgggtcgaatttgctttcgaatttctgccattcatccgcttattatcacttattcaggcgtagcaccaggcgtttaagggcaccaataactgccttaaaaaaattacgccccgccctgccactcatcgcagtactgttgtaattcattaagcattctgccgacatggaagccatcacagacggcatgatgaacctgaatcgccagcggcatcagcaccttgtcgccttgcgtataatatttgcccatggtgaaaacgggggcgaagaagttgtccatattggccacgtttaaatcaaaactggtgaaactcacccagggattggctgagacgaaaaacatattctcaataaaccctttagggaaataggccaggttttcaccgtaacacgccacatcttgcgaatatatgtgtagaaactgccggaaatcgtcgtggtattcactccagagcgatgaaaacgtttcagtttgctcatggaaaacggtgtaacaagggtgaacactatcccatatcaccagctcaccgtctttcattgccatacg

SEQ ID NO: 881 - DNA, 8995 bp, Artificial Sequence
  Description of Artificial Sequence: Synthetic polynucleotide
gaattccggatgagcattcatcaggcgggcaagaatgtgaataaaggccggataaaacttgtgcttatttttctttacggtctttaaaaaggccgtaatatccagctgaacggtctggttataggtacattgagcaactgactgaaatgcctcaaaatgttctttacgatgccattgggatatatcaacggtggtatatccagtgatttttttctccattttagcttccttagctcctgaaaatctcgataactcaaaaaatacgcccggtagtgatcttatttcattatggtgaaagttggaacctcttacgtgccgatcaacgtctcattttcgccaaaagttggcccagggcttcccggtatcaacagggacaccaggatttatttattctgcgaagtgatcttccgtcacaggtatttattcggcgcaaagtgcgtcgggtgatgctgccaacttactgatttagtgtatgatggtgtttttgaggtgctccagtggcttctgtttctatcagctgtccctcctgttcagctactgacggggtggtgcgtaacggcaaaagcaccgccggacatcagcgctagcggagtgtatactggcttactatgttggcactgatgagggtgtcagtgaagtgcttcatgtggcaggagaaaaaaggctgcaccggtgcgtcagcagaatatgtgatacaggatatattccgcttcctcgctcactgactcgctacgctcggtcgttcgactgcggcgagcggaaatggcttacgaacggggcggagatttcctggaagatgccaggaagatacttaacagggaagtgagagggccgcggcaaagccgtttttccataggctccgcccccctgacaagcatcacgaaatctgacgctcaaatcagtggtggcgaaacccgacaggactataaagataccaggcgtttccccctggcggctccctcgtgcgctctcctgttcctgcctttcggtttaccggtgtcattccgctgttatggccgcgtttgtctcattccacgcctgacactcagttccgggtaggcagttcgctccaagctggactgtatgcacgaaccccccgttcagtccgaccgctgcgccttatccggtaactatcgtcttgagtccaacccggaaagacatgcaaaagcaccactggcagcagccactggtaattgatttagaggagttagtcttgaagtcatgcgccggttaaggctaaactgaaaggacaagttttggtgactgcgctcctccaagccagttacctcggttcaaagagttggtagctcagagaaccttcgaaaaaccgccctgcaaggcggttttttcgttttcagagcaagagattacgcgcagaccaaaacgatctcaagaagatcatcttattaatcagataaaatatttctagatttcagtgcaatttatctcttcaaatgtagcacctgaagtcagccccatacgatataagttgtaattctcatgtttgacagcttatcatcgataagctttaatgcggtagtttatcacagttaaattgctaacgcagtcaggcaccgtgtatgaaatctaacaatgcgctcatcgtcatcctcggcaccgtcaccctggatgctgtaggcataggcttggttatgccggtactgccgggcctcttgcgggatttaagctcgggccccctgggcggttctgataacgagtaatcgttaatccgcaaataacgtaaaaacccgcttcggcgggtttttttatggggggagtttagggaaagagcatttgtcagaatatttaagggcgcctgtcactttgcttgatatatgagaattatttaaccttataaatgagaaaaaagcaacgcactttaaataagatacgttgctttttcgattgatgaacacctataattaaactattcatctattatttatgattttttgtatatacaatatttctagtttgttaaagagaattaagaaaataaatctcgaaaataataaagggaaaatcagtttttgatttaaaacaggcggtttaaaccgtttaacgcagctacccgataggcttccgccatcgtcgggtagttaaaggtggtgttgacgaagtactcaatagtgttgccgccacctttctgttccataatcgcctgaccgatatgaataatttcggcagcgcgctcgccaaagcagtgaatacccagaatctcttttgtttcccgatggaacaaaattttcagcgtgcccacgttcatgccgacgatttgtgcgcgtgccagatgtttaaactgggcgcggcccacttcatatggcactttcattgcggtcagctgctgttcggttttgcccacagagctgatttccgggatggtgtaaataccggtagggatatcttcaatcagatgtgcggtggcttcgccttttaccagcgcctgcgcggcaatgcgcccctggtcataggccgccgacgccaggctcggataaccaatcacgtcgcccaccgcgtaaacgtgtggctgtgcggtctgatacatgctgttgaccttcagctgtccgcggctgtcagtttctagcccaatgttctgtaacgccagcgaatcggtattaccggtgcgaccgttggcatagagcaggcagtcagctttcagttttttacccgacttcagatgcatgatcacaccatcgtcacagccttcgatcttctcgtactcttcgttgtgacgaatcactacgccactgttccagaagtgataggagagagaatctgacatctcttgatcgagaaatgccagcaggcgatcgcgggtgttgatcagatccacttttacatccataccgcggaagatcgacgcatattcacagccgatcactccagcaccatagataagtacatggcgcggttcgtggtgcatgctgagaattgagtcgctgtcgtaaatgcgtggatgggtgaaatcaacatctgttggatgatatggacgagagccgcaggcaataacaaatttttcagcggttagtgtttcaacgctgccgtccgggcaatccagcgccaacgtatgctcgtcaacaaagcgagcgtttccctgcaatatttcacagtgattacgttcgtaaaatccctgacgcatgcgcgtttgttgattaatcacgttatcggcatggttaaggatatcggcaaaagaagagcggagcagtcgggaatggtcgctgtaaagtgggttttgattgaattctataatgcggctgacggcgtgacggagagctttcgacgggatggtgccccagtgggtgcaaccgccgccaacattttgataacgctcgataactgcgacgcgcgcaccttgcttaaccaggcccattgcagcgccttcgccgccggggccggaacctattactatggcatcgtaatcgtaggaatgtggggccatggtagggcttacctgttcttgaatagttctttcaaactatgagaatattatatcaagaattgtaggattaagcaactgaaatttttaagtagttaagatctataacttcgtataatgtatgctatacgaagttatgtttaaatcatacctgacctccatagcagaaagtcaaaagcctccgaccggaggcttttgacttgagggggatcagcttctattatttctcttgcaggcccagtttcttttccaggtagtgaatgttcgtaccgccgtgctggaaattctcgtcgttcataatgcggatctgcaaatccacattggtcttaatgccatcaatgatcagctcttgcagcgcgtttttcatgcgggcgatcgcgacatcacgattttcgccatagcagatcagtttaccaatcatgctgtcatagtacggcggcacggtgtaaccggcgtagatgtgagactcccaacgaacgccaaaaccacctggcgcgtgaaaacgcgtgatcttaccagggctcggcagaaaggtattcgggtcctccgcattgatacggcactcgaccgcgtgaccacgaacgtgcacctcttcttgcttgatcgacagcggctgaccagccgcaatgcgcagttgctctttgatcagatcaacgccagtaatcatctcggtcaccgggtgctcaacctggatgcgggtattcatttcaatgaagtaaaactcaccattttcgaacaggaactcaaacgtacccgcaccacggtaaccaatgtccacacacgctttcgcacagcgctcaccgatgtagcgacgcagttccggcgtaatacccggagccggtgcctcttccaccaccttctgatgacggcgttgcatggagcaatcacgttctgccaagtagatcgcattgccctgaccatccgccagaacttggatttcaacgtggcgcggattctccagatacttctccatatacaccatatcgttagagaacgccgctttggcttccgcacgggtcatgctgatgctttgcgccagttccgcatcaccacggacgacacgcataccacggccaccgccaccaccagaggctttgataatgaccgggtagccaatacgtttagcgatggcacggttcttgtccatatcgtcacccagcggaccatcgctgcccggaacacacggcacaccggcctttttcatcgctgcaatggcgctcactttgtcgcccatcaggcgaatcgtctccgccttagggccaatgaagatgaaaccgctacgctccacttgttcagcaaagttagcgttctcgctcaggaaaccgtagcccggatgaatcgccactgcaccggtgatctctgccgcagagatgatggccgggatgttcagatagcttttcacgctcggtgccggaccgatgcaaaccgtttcgtcggccagcagaacatgcttcaggtcgcggtctgcgctggaatgcacggcaacagtcttaatgcccagctctttacacgcgcgcaagatacgcagcgcgatttcaccgcggtttgcaatcacgatcttgtccaacatgttcgcctcgttactcgatcacaaccagcggttcatcgaactcaacaggctggccggattccaccaggatcgctttaacagtaccgctcttatccgcttcaatctggttcatcattttcattgcctcaacgatacacagcgtgtcgccgacattgaccttctggccgacttcgatgaaggcttttgcgtccggcgacggcgtgcgatagaaggtgcccaccatcgggctacgcacgatatgacccgaaatctcggccgctgccggtgcctccatgcttggaacggtcgccggtgcagcggcgttgctctgtgccggctgttgcatcatcggagcggcgtatgcttgctgcataaccggaaagctcgctgccggtgccgcacgggaaatacggacgctctcttcaccttcgctgatctccagctcgctgatgccgctttcttcaaccagttcaatcagtttcttgatcttacgaatgtccatggtttttcctccttcgcctgtggtatgaaatttcacacgcattatatacaaaaaaagcgattcagaccccgttggcaagccgcgtggttaactccacgtgctattatgcctccggctcttggtccgggaccggcggaaccacgacaccctcacgcggtgcttcaggattcggagccggcagattcatcaatttcgccagaatgctcgccagtttcagacgcatttctggacggcgaacgatcatgtcgatggcacctttctcaatcaggaactcgctgcgctggaaaccaggcggcaacttttcgcgaaccgtctgttcaataacacgcggaccagcaaaaccaatcagagccttcggctctgcgatgttcaaatcacccagcatcgcaaagctggcgctgacaccgcccatcgtagggtcggtcaggacggaaatgtacggcaggccgcgttcttgcatcttcgccagggctgccgaggtttttgccatctgcatcaggctcatcagggcctcttgcatacgcgcaccaccgctcgcgctgaaacaaatcagaggacagttatcctccagcgcctgctccacggcacgcacaaagcgtgcgcccaccacggaacccatgctgccacccataaacgcaaactcgaacgccgcagcaacaaccggcataccatacagggtgcctttcataacaaccagtgcgtccttctcaccggtttctttttgtgcagatgccaaacgatccttatacttcttggaatcacggaatttcagaacatctttcggttccagttcgctacccagctcgaccaggctgccctcatccagcaggctatgcagacgattacgagcggtcatacgcatgtgatggtcgcatttcgggcacacttccaggttacgctccagctccgcacgatacaaaacctgaccgcagctatcgcatttggtccagacgccttcagggatgctcgccttgcgggtcggggtgatattggacttaatgcgttcaatccagctcatgattttcctcctttactacgcgtagccatagctcatcaagcgctgatagcgacggtttttcagatcctccgtgctcagcacgtccagatccgccaggtccgccagcagctgggccttcaggctggctgccatcgcctccggattacggtgagcaccgcccagcggttccgggatgatagaatcaatcaacttcagttctttcagacgcggtgcgatgatacccatcgcttccgctgccaatggtgctttatccgcgctcttccacagaatggaagcgcaaccttccgggctaatgacgctgtacgtgctgtattgcagcatgttgaccttatcaccgacaccgatcgccaacgcaccaccgctaccgccctcgccaatcacggtgcaaacgaccggcacacccagacgagacatctcacgcaggttacgtgcgatggcctcgctctgaccacgctcttccgcaccaacgcctgggtacgcacccggcgtatcaatgaacgtgataatcggcatcttaaagcgttcggccatttgcatcagacgcagggccttgcggtagccctccggtgccggcataccaaagttacgacgaatcttttctttcgtctcgcggcctttttgatggccgataatcatcaccggacggccatccaaacgagcaataccgccgacaattgctttatcgtccgcataggcgcggtcgcctgccagttcgtcgaactcgtcaaacgccaggcgcacgtagtccagggtatatgggcgttgtgggtggcgagccaactgggcaatctgccatgcgcccaaatcagcaaagattttgcgagtcagttcaacagacttctcacgcaaacggtggacctcttcgtcgatgttaatgtccagtttctcatcttgacggctaaccgcggtcaggctgtcaatcttcgcttccagttctgcaatcggctgctcgaagtccaggaagttcagggacatgtttttcctcctgccccgcgcttataagcgaataaaggaagatggccgccccgcagggcagcaggtctgtgaaacagtatagagattcatcggcacaaaggctttgctttttgtcatttattcaaaccggcgcctcgaaccggctccgggcattgccctggccggcactttgcatggggagatgcggatctcgggcagcgttgggtcctggccacgggtgcgcatgatcgtgctcctgtcgttgaggacccggctaggctggcggggttgccttactggttagcagaatgaatcaccgatacgcgagcgaacgtgaagcgactgctgctgcaaaacgtctgcgacctgagcaacaacatgaatggtcttcggtttccgtgtttcgtaaagtctggaaacgcggaagtcccctacgtgctgctgaagttgcccgcaacagagagtggaaccaaccggtgataccacgatactatgactgagagtcaacgccatgagcggcctcatttcttattctgagttacaacagtccgcaccgctgtccggtagctccttccggtgggcgcggggcatgactatcgtcgccgcacttatgactgtcttctttatcatgcaactcgtaggacaggtgccggcagcgcccaacagtcccccggccacggggcctgccaccatacccacgccgaaacaagcgccctgcaccattatgttccggatctgcatcgcaggatgctgctggctaccctgtggaacacctacatctgtattaacgaagcgctaaccgtttttatcaggctctgggaggcagaataaatgatcatatcgtcaattattacctccacggggagagcctgagcaaactggcctcaggcatttgagaagcacacggtcacactgcttccggtagtcaataaaccggtaaaccagcaatagacataagcggctatttaacgaccctgccctgaaccgacgaccgggtcgaatttgctttcgaatttctgccattcatccgcttattatcacttattcaggcgtagcaccaggcgtttaagggcaccaataactgccttaaaaaaattacgccccgccctgccactcatcgcagtactgttgtaattcattaagcattctgccgacatggaagccatcacagacggcatgatgaacctgaatcgccagcggcatcagcaccttgtcgccttgcgtataatatttgcccatggtgaaaacgggggcgaagaagttgtccatattggccacgtttaaatcaaaactggtgaaactcacccagggattggctgagacgaaaaacatattctcaataaaccctttagggaaataggccaggttttcaccgtaacacgccacatcttgcgaatatatgtgtagaaactgccggaaatcgtcgtggtattcactccagagcgatgaaaacgtttcagtttgctcatggaaaacggtgtaacaagggtgaacactatcccatatcaccagctcaccgtctttcattgccatacg

SEQ ID NO: 882 - DNA, 10319 bp, Artificial Sequence
  Description of Artificial Sequence: Synthetic polynucleotide
ccttcaactcagcaaaagttcgatttattcaacaaagccacgttgtgtctcaaaatctctgatgttacattgcacaagataaaaatatatcatcatgaacaataaaactgtctgcttacataaacagtaatacaaggggtgttatgagccatattcaacgggaaacgtcttgctcgaggccgcgattaaattccaacatggatgctgatttatatgggtataaatgggctcgcgataatgtcgggcaatcaggtgcgacaatctatcgattgtatgggaagcccgatgcgccagagttgtttctgaaacatggcaaaggtagcgttgccaatgatgttacagatgagatggtcagactaaactggctgacggaatttatgcctcttccgaccatcaagcattttatccgtactcctgatgatgcatggttactcaccactgcgatccccgggaaaacagcattccaggtattagaagaatatcctgattcaggtgaaaatattgttgatgcgctggcagtgttcctgcgccggttgcattcgattcctgtttgtaattgtccttttaacagcgatcgcgtatttcgtctcgctcaggcgcaatcacgaatgaataacggtttggttgatgcgagtgattttgatgacgagcgtaatggctggcctgttgaacaagtctggaaagaaatgcataagcttttgccattctcaccggattcagtcgtcactcatggtgatttctcacttgataaccttatttttgacgaggggaaattaataggttgtattgatgttggacgagtcggaatcgcagaccgataccaggatcttgccatcctatggaactgcctcggtgagttttctccttcattacagaaacggctttttcaaaaatatggtattgataatcctgatatgaataaattgcagtttcatttgatgctcgatgagtttttctaatcgagtcaggcaactatggatgaacgaaatagacagatcgctgagataggtgcctcactgattaagcattggtaactgtcagaccaagtttactcatatatactttagattgatttaaaacttcatttttaatttaaaaggatctaggtgaagatcctttttgataatctcatgaccaaaatcccttaacgtgagttttcgttccactgagcgtcagaccccgtagaaaagatcaaaggatcttcttgagatcctttttttctgcgcgtaatctgctgcttgcaaacaaaaaaaccaccgctaccagcggtggtttgtttgccggatcaagagctaccaactctttttccgaaggtaactggcttcagcagagcgcagataccaaatactgtccttctagtgtagccgtagttaggccaccacttcaagaactctgtagcaccgcctacatacctcgctctgctaatcctgttaccagtggctgctgccagtggcgataagtcgtgtcttaccgggttggactcaagacgatagttaccggataaggcgcagcggtcgggctgaacggggggttcgtgcacacagcccagcttggagcgaacgacctacaccgaactgagatacctacagcgtgagctatgagaaagcgccacgcttcccgaagggagaaaggcggacaggtatccggtaagcggcagggtcggaacaggagagcgcacgagggagcttccagggggaaacgcctggtatctttatagtcctgtcgggtttcgccacctctgacttgagcgtcgatttttgtgatgctcgtcaggggggcggagcctatggaaaaacgccagcaacgcggcctttttacggttcctggccttttgctggccttttgctcacatggtacttggatcctcattagtacagcagacgggcgcgaatggtacccggaatagctttcattgcctgcagcgctttttcggcaacgtcttcgtcggcttcaatatcaataaccacataacccatctgggcggaagtttgcagatattgcgcggcgatgttgacgccctgctcggcgaagattttgttcagcgcagttagcacgcccggacggttttcgtggatgtgcatcagacgacgcccaccgtgcagtggcagcgagacttccgggaagttcaccgcagagagcgttgagccattgtcagaatacttgatcaatttacccgcaacttccaggccgatattctcctgcgcttcctgagtcgaaccgccaatgtgtggcgtcagaaggacgttgtcgaattcacacagcggagaggtaaatggatcgctattggtcgccggttccgtcgggaatacgtcgattgccgcccccgccagatgtttgctcgccagcgcatcacacagcgccggaatatccaccacagtaccgcgcgaagcattaatcagcagcgagccgggcttcattagtgaaatttctttcgcgcccatcatatttttggtggacggattctctggtacatgcagactcaccacatcgctcatattcagcaggtcagaaagatgctgtacctgagtggcgttgcccagcggcagtttattttcaatatcataaaagtaaacatacattcccagcgattcagccagaatgcccaattgcgtaccaatatgaccgtagccgatgatacccagctttttgccgcgcgcttcaaaagaacccgccgccagtttgttccacacgccacggtgcgctttagcattggcttccggcacgccgcgcaatagcagcagcagttcgccaatcaccagctccgcaacagagcgcgtatttgagaacggtgcgttaaataccgggatcccgcgctttgccgccgcatccagatcaacctggtttgttccgatacagaaacagccaatagcgaccagtttttctgcggcgttgatcacgtcttcagtcagatgggtacgggatcgcaggccgatgaagtgggcatcgcggatggattcttttaattgttcatcatccagcgcgcctttgtgaaattcgatgttggtgtaaccagctgcacgaaggctttccagcgccttttggtgcacgccttctaccagcagaaacttaatcttgtctttctccagcgatacctttgccatggtaattctccacgcttataagcgaataaaggaagatggccgccccgcagggcagcaggtctgtgaaacagtatagagattcatcggcacaaaggctttgctttttgtcatttattcaaacctgtacgaaagggtgtatcgctcaatactgaccatttaaatcatacctgacccatgttctttcctgcgttatcccctgattctgtggataaccgtattaccgcctttgagtgagctgataccgctcgccgcagccgaacgaccgagcgcagcgagtcagtgagcgaggaagcggaagagcgcctgatgcggtattttctccttacgcatctgtgcggtatttcacaccgcatatggtgcactctcagtacaatctgctctgatgccgcatagttaagccagtatacactccgctatcgctacgtgactgggtcatggctgcgccccgacacccgccaacacccgctgacgcgccctgacgggcttgtctgctcccggcatccgcttacagacaagctgtgaccgtctccgggagctgcatgtgtcagaggttttcaccgtcatcaccgaaacgcgcgaggcagcagatcaattcgcgcgcgaaggcgaagcggcatgcatttacgttgacaccatcgaatggtgcaaaacctttcgcggtatggcatgatagcgcccggaagagagtcaattcagggtggtgaatgtgaaaccagtaacgttatacgatgtcgcagagtatgccggtgtctcttatcagaccgtttcccgcgtggtgaaccaggccagccacgtttctgcgaaaacgcgggaaaaagtggaagcggcgatggcggagctgaattacattcccaaccgcgtggcacaacaactggcgggcaaacagtcgttgctgattggcgttgccacctccagtctggccctgcacgcgccgtcgcaaattgtcgcggcgattaaatctcgcgccgatcaactgggtgccagcgtggtggtgtcgatggtagaacgaagcggcgtcgaagcctgtaaagcggcggtgcacaatcttctcgcgcaacgcgtcagtgggctgatcattaactatccgctggatgaccaggatgccattgctgtggaagctgcctgcactaatgttccggcgttatttcttgatgtctctgaccagacacccatcaacagtattattttctcccatgaagacggtacgcgactgggcgtggagcatctggtcgcattgggtcaccagcaaatcgcgctgttagcgggcccattaagttctgtctcggcgcgtctgcgtctggctggctggcataaatatctcactcgcaatcaaattcagccgatagcggaacgggaaggcgactggagtgccatgtccggttttcaacaaaccatgcaaatgctgaatgagggcatcgttcccactgcgatgctggttgccaacgatcagatggcgctgggcgcaatgcgcgccattaccgagtccgggctgcgcgttggtgcggatatctcggtagtgggatacgacgataccgaagacagctcatgttatatcccgccgtcaaccaccatcaaacaggattttcgcctgctggggcaaaccagcgtggaccgcttgctgcaactctctcagggccaggcggtgaagggcaatcagctgttgcccgtctcactggtgaaaagaaaaaccaccctggcgcccaatacgcaaaccgcctctccccgcgcgttggccgattcattaatgcagctggcacgacaggtttcccgactggaaagcgggcagtgagcgcaacgcaattaatgtaagttagcgcgaattgatctggtttgacagcttatcatcgactgcacggtgcaccaatgcttctggcgtcaggcagccatcggaagctgtggtatggctgtgcaggtcgtaaatcactgcataattcgtgtcgctcaaggcgcactcccgttctggataatgttttttgcgccgacatcataacggttctggcaaatattctgaaatgagctgttgacaattaatcatccggctcgtataatgtgtggaattgtgagcggataacaatttcacacaggaaacagcgccgctgagaaaaagcgaagcggcactgctctttaacaatttatcagacaatctgtgtgggcactcgaccggaattatcgattaactttattattaaaaattaaagaggtatatattaatgtatcgattaaataaggaggaataaaccatggccggtacgggtcgtttggctggtaaaattgcattgatcaccggtggtgctggtaacattggttccgagctgacccgccgttttctggccgagggtgcgacggttattatcagcggccgtaaccgtgcgaagctgaccgcgctggccgagcgcatgcaagccgaggccggcgtgccggccaagcgcattgatttggaggtgatggatggttccgaccctgtggctgtccgtgccggtatcgaggcaatcgtcgctcgccacggtcagattgacattctggttaacaacgcgggctccgccggtgcccaacgtcgcttggcggaaattccgctgacggaggcagaattgggtccgggtgcggaggagactttgcacgcttcgatcgcgaatctgttgggcatgggttggcacctgatgcgtattgcggctccgcacatgccagttggctccgcagttatcaacgtttcgactattttctcgcgcgcagagtactatggtcgcattccgtacgttaccccgaaggcagcgctgaacgctttgtcccagctggctgcccgcgagctgggcgctcgtggcatccgcgttaacactattttcccaggtcctattgagtccgaccgcatccgtaccgtgtttcaacgtatggatcaactgaagggtcgcccggagggcgacaccgcccatcactttttgaacaccatgcgcctgtgccgcgcaaacgaccaaggcgctttggaacgccgctttccgtccgttggcgatgttgctgatgcggctgtgtttctggcttctgctgagagcgcggcactgtcgggtgagacgattgaggtcacccacggtatggaactgccggcgtgtagcgaaacctccttgttggcgcgtaccgatctgcgtaccatcgacgcgagcggtcgcactaccctgatttgcgctggcgatcaaattgaagaagttatggccctgacgggcatgctgcgtacgtgcggtagcgaagtgattatcggcttccgttctgcggctgccctggcgcaatttgagcaggcagtgaatgaatctcgccgtctggcaggtgcggatttcaccccgccgatcgctttgccgttggacccacgtgacccggccaccattgatgcggttttcgattggggcgcaggcgagaatacgggtggcatccatgcggcggtcattctgccggcaacctcccacgaaccggctccgtgcgtgattgaagtcgatgacgaacgcgtcctgaatttcctggccgatgaaattaccggcaccatcgttattgcgagccgtttggcgcgctattggcaatcccaacgcctgaccccgggtgcccgtgcccgcggtccgcgtgttatctttctgagcaacggtgccgatcaaaatggtaatgtttacggtcgtattcaatctgcggcgatcggtcaattgattcgcgtttggcgtcacgaggcggagttggactatcaacgtgcatccgccgcaggcgatcacgttctgccgccggtttgggcgaaccagattgtccgtttcgctaaccgctccctggaaggtctggagttcgcgtgcgcgtggaccgcacagctgctgcacagccaacgtcatattaacgaaattacgctgaacattccagccaatattagcgcgaccacgggcgcacgttccgccagcgtcggctgggccgagtccttgattggtctgcacctgggcaaggtggctctgattaccggtggttcggcgggcatcggtggtcaaatcggtcgtctgctggccttgtctggcgcgcgtgtgatgctggccgctcgcgatcgccataaattggaacagatgcaagccatgattcaaagcgaattggcggaggttggttataccgatgtggaggaccgtgtgcacatcgctccgggttgcgatgtgagcagcgaggcgcagctggcagatctggtggaacgtacgctgtccgcattcggtaccgtggattatttgattaataacgccggtattgcgggcgtggaggagatggtgatcgacatgccggtggaaggctggcgtcacaccctgtttgccaacctgatttcgaattattcgctgatgcgcaagttggcgccgctgatgaagaagcaaggtagcggttacatcctgaacgtttcttcctattttggcggtgagaaggacgcggcgattccttatccgaaccgcgccgactacgccgtctccaaggctggccaacgcgcgatggcggaagtgttcgctcgtttcctgggtccagagattcagatcaatgctattgccccaggtccggttgaaggcgaccgcctgcgtggtaccggtgagcgtccgggcctgtttgctcgtcgcgcccgtctgatcttggagaataaacgcctgaacgaattgcacgcggctttgattgctgcggcccgcaccgatgagcgctcgatgcacgagttggttgaattgttgctgccgaacgacgtggccgcgttggagcagaacccagcggcccctaccgcgctgcgtgagctggcacgccgcttccgtagcgaaggtgatccggcggcaagctcctcgtccgccttgctgaatcgctccatcgctgccaagctgttggctcgcttgcataacggtggctatgtgctgccggcggatatttttgcaaatctgcctaatccgccggacccgttctttacccgtgcgcaaattgaccgcgaagctcgcaaggtgcgtgatggtattatgggtatgctgtatctgcagcgtatgccaaccgagtttgacgtcgctatggcaaccgtgtactatctggccgatcgtaacgtgagcggcgaaactttccatccgtctggtggtttgcgctacgagcgtaccccgaccggtggcgagctgttcggcctgccatcgccggaacgtctggcggagctggttggtagcacggtgtacctgatcggtgaacacctgaccgagcacctgaacctgctggctcgtgcctatttggagcgctacggtgcccgtcaagtggtgatgattgttgagacggaaaccggtgcggaaaccatgcgtcgtctgttgcatgatcacgtcgaggcaggtcgcctgatgactattgtggcaggtgatcagattgaggcagcgattgaccaagcgatcacgcgctatggccgtccgggtccggtggtgtgcactccattccgtccactgccaaccgttccgctggtcggtcgtaaagactccgattggagcaccgttttgagcgaggcggaatttgcggaactgtgtgagcatcagctgacccaccatttccgtgttgctcgtaagatcgccttgtcggatggcgcgtcgctggcgttggttaccccggaaacgactgcgactagcaccacggagcaatttgctctggcgaacttcatcaagaccaccctgcacgcgttcaccgcgaccatcggtgttgagtcggagcgcaccgcgcaacgtattctgattaaccaggttgatctgacgcgccgcgcccgtgcggaagagccgcgtgacccgcacgagcgtcagcaggaattggaacgcttcattgaagccgttctgctggttaccgctccgctgcctcctgaggcagacacgcgctacgcaggccgtattcaccgcggtcgtgcgattaccgtctaatagaagcttggctgttttggcggatgagagaagattttcagcctgatacagattaaatcagaacgcagaagcggtctgataaaacagaatttgcctggcggcagtagcgcggtggtcccacctgaccccatgccgaactcagaagtgaaacgccgtagcgccgatggtagtgtggggtctccccatgcgagagtagggaactgccaggcatcaaataaaacgaaaggctcagtcgaaagactgggcctttcgttttatctgttgtttgtcggtgaacgctctcctgagtaggacaaatccgccgggagcggatttgaacgttgcgaagcaacggcccggagggtggcgggcaggacgcccgccataaactgccaggcatcaaattaagcagaaggccatcctgacggatggcctttttgcgtttctacaaactctttttgtttatttttctaaatacattcaaatatgtatccgctcatgagacaataaccctgataaatgcttcaataatattgaaaaaggaagagtatgagtattcaacatttccgtgtcgcccttattcccttttttgcggcattttgccttcctgtttttgctcacccagaaacgctggtgaaagtaaaagatgctgaagatcagttgggtgcacgagtgggttacatcgaactggatctcaacagcggtaagatccttgagagttttcgccccgaagaacgttttccaatgatgagcacttttaaagttctgctatgtggcgcggtattatcccgtgttgacgccgggcaagagcaactcggtcgccgcatacactattctcagaatgacttggttgagtactcaccagtcacagaaaagcatcttacggatggcatgacagtaagagaattatgcagtgctgccataaccatgagtgataacactgcggccaacttacttctgacaacgatcggaggaccgaaggagctaaccgcttttttgcacaacatgggggatcatgtaactcgccttgatcgttgggaaccggagctgaatgaagccataccaaacgacgagcgtgacaccacgatgcctgtagcaatggcaacaacgttgcgcaaactattaactggcgaactacttactctagcttcccggcaacaattaatagactggatggaggcggataaagttgcaggaccacttctgcgctcggcccttccggctggctggtttattgctgataaatctggagccggtgagcgtgggtctcgcggtatcattgcagcactggggccagatggtaagccctcccgtatcgtagttatctacacgacgg

SEQ ID NO: 883 - DNA, 5543 bp, Artificial Sequence
  Description of Artificial Sequence: Synthetic polynucleotide
gtttgacagcttatcatcgactgcacggtgcaccaatgcttctggcgtcaggcagccatcggaagctgtggtatggctgtgcaggtcgtaaatcactgcataattcgtgtcgctcaaggcgcactcccgttctggataatgttttttgcgccgacatcataacggttctggcaaatattctgaaatgagctgttgacaattaatcatccggctcgtataatgtgtggaattgtgagcggataacaatttcacacaggaaacagcgccgctgagaaaaagcgaagcggcactgctctttaacaatttatcagacaatctgtgtgggcactcgaccggaattatcgattaactttattattaaaaattaaagaggtatatattaatgtatcgattaaataaggaggaataaaccatgggatctaagcgtcgtgtagttgtgaccggactgggcatgttgtctcctgtcggcaataccgtagagtctacctggaaagctctgcttgccggtcagagtggcatcagcctaatcgaccatttcgatactagcgcctatgcaacgaaatttgctggcttagtaaaggattttaactgtgaggacattatctcgcgcaaagaacagcgcaagatggatgccttcattcaatatggaattgtcgctggcgttcaggccatgcaggattctggccttgaaataacggaagagaacgcaacccgcattggtgccgcaattggctccgggattggcggcctcggactgatcgaagaaaaccacacatctctgatgaacggtggtccacgtaagatcagcccattcttcgttccgtcaacgattgtgaacatggtggcaggtcatctgactatcatgtatggcctgcgtggcccgagcatctctatcgcgactgcctgtacttccggcgtgcacaacattggccatgctgcgcgtattatcgcgtatggcgatgctgacgtgatggttgcaggtggcgcagagaaagccagtacgccgctgggcgttggtggttttggcgcggcacgtgcattatctacccgcaatgataacccgcaagcggcgagccgcccgtgggataaagagcgtgatggtttcgtactgggcgatggtgccggtatgctggtacttgaagagtacgaacacgcgaaaaaacgcggtgcgaaaatttacgctgaactcgtcggctttggtatgagcagcgatgcttatcatatgacgtcaccgccagaaaatggcgcaggcgcagctctggcgatggcaaatgctctgcgtgatgcaggcattgaagcgagtcagattggctacgttaacgcgcacggtacttctacgccggctggcgataaagctgaagcgcaggcggtgaaaaccatcttcggtgaagctgcaagccgtgtgttggtaagctccacgaaatctatgaccggtcacctgttaggtgcggcgggtgcagtagaatctatctactccatcctggcgctgcgcgatcaggctgttccgccaaccatcaacctggataacccggatgaaggttgcgatctggatttcgtaccgcacgaagcgcgtcaggttagcggaatggaatacactctgtgtaactccttcggcttcggtggcactaatggttctttgatctttaaaaagatctaattactgcagctggtaccatatgggaattcgaagcttggctgttttggcggatgagagaagattttcagcctgatacagattaaatcagaacgcagaagcggtctgataaaacagaatttgcctggcggcagtagcgcggtggtcccacctgaccccatgccgaactcagaagtgaaacgccgtagcgccgatggtagtgtggggtctccccatgcgagagtagggaactgccaggcatcaaataaaacgaaaggctcagtcgaaagactgggcctttcgttttatctgttgtttgtcggtgaacgctctcctgagtaggacaaatccgccgggagcggatttgaacgttgcgaagcaacggcccggagggtggcgggcaggacgcccgccataaactgccaggcatcaaattaagcagaaggccatcctgacggatggcctttttgcgtttctacaaactctttttgtttatttttctaaatacattcaaatatgtatccgctcatgagacaataaccctgataaatgcttcaataatattgaaaaaggaagagtatgagtattcaacatttccgtgtcgcccttattcccttttttgcggcattttgccttcctgtttttgctcacccagaaacgctggtgaaagtaaaagatgctgaagatcagttgggtgcacgagtgggttacatcgaactggatctcaacagcggtaagatccttgagagttttcgccccgaagaacgttttccaatgatgagcacttttaaagttctgctatgtggcgcggtattatcccgtgttgacgccgggcaagagcaactcggtcgccgcatacactattctcagaatgacttggttgagtactcaccagtcacagaaaagcatcttacggatggcatgacagtaagagaattatgcagtgctgccataaccatgagtgataacactgcggccaacttacttctgacaacgatcggaggaccgaaggagctaaccgcttttttgcacaacatgggggatcatgtaactcgccttgatcgttgggaaccggagctgaatgaagccataccaaacgacgagcgtgacaccacgatgcctgtagcaatggcaacaacgttgcgcaaactattaactggcgaactacttactctagcttcccggcaacaattaatagactggatggaggcggataaagttgcaggaccacttctgcgctcggcccttccggctggctggtttattgctgataaatctggagccggtgagcgtgggtctcgcggtatcattgcagcactggggccagatggtaagccctcccgtatcgtagttatctacacgacggggagtcaggcaactatggatgaacgaaatagacagatcgctgagataggtgcctcactgattaagcattggtaactgtcagaccaagtttactcatatatactttagattgatttaaaacttcatttttaatttaaaaggatctaggtgaagatcctttttgataatctcatgaccaaaatcccttaacgtgagttttcgttccactgagcgtcagaccccgtagaaaagatcaaaggatcttcttgagatcctttttttctgcgcgtaatctgctgcttgcaaacaaaaaaaccaccgctaccagcggtggtttgtttgccggatcaagagctaccaactctttttccgaaggtaactggcttcagcagagcgcagataccaaatactgtccttctagtgtagccgtagttaggccaccacttcaagaactctgtagcaccgcctacatacctcgctctgctaatcctgttaccagtggctgctgccagtggcgataagtcgtgtcttaccgggttggactcaagacgatagttaccggataaggcgcagcggtcgggctgaacggggggttcgtgcacacagcccagcttggagcgaacgacctacaccgaactgagatacctacagcgtgagctatgagaaagcgccacgcttcccgaagggagaaaggcggacaggtatccggtaagcggcagggtcggaacaggagagcgcacgagggagcttccagggggaaacgcctggtatctttatagtcctgtcgggtttcgccacctctgacttgagcgtcgatttttgtgatgctcgtcaggggggcggagcctatggaaaaacgccagcaacgcggcctttttacggttcctggccttttgctggccttttgctcacatgttctttcctgcgttatcccctgattctgtggataaccgtattaccgcctttgagtgagctgataccgctcgccgcagccgaacgaccgagcgcagcgagtcagtgagcgaggaagcggaagagcgcctgatgcggtattttctccttacgcatctgtgcggtatttcacaccgcatatggtgcactctcagtacaatctgctctgatgccgcatagttaagccagtatacactccgctatcgctacgtgactgggtcatggctgcgccccgacacccgccaacacccgctgacgcgccctgacgggcttgtctgctcccggcatccgcttacagacaagctgtgaccgtctccgggagctgcatgtgtcagaggttttcaccgtcatcaccgaaacgcgcgaggcagcagatcaattcgcgcgcgaaggcgaagcggcatgcatttacgttgacaccatcgaatggtgcaaaacctttcgcggtatggcatgatagcgcccggaagagagtcaattcagggtggtgaatgtgaaaccagtaacgttatacgatgtcgcagagtatgccggtgtctcttatcagaccgtttcccgcgtggtgaaccaggccagccacgtttctgcgaaaacgcgggaaaaagtggaagcggcgatggcggagctgaattacattcccaaccgcgtggcacaacaactggcgggcaaacagtcgttgctgattggcgttgccacctccagtctggccctgcacgcgccgtcgcaaattgtcgcggcgattaaatctcgcgccgatcaactgggtgccagcgtggtggtgtcgatggtagaacgaagcggcgtcgaagcctgtaaagcggcggtgcacaatcttctcgcgcaacgcgtcagtgggctgatcattaactatccgctggatgaccaggatgccattgctgtggaagctgcctgcactaatgttccggcgttatttcttgatgtctctgaccagacacccatcaacagtattattttctcccatgaagacggtacgcgactgggcgtggagcatctggtcgcattgggtcaccagcaaatcgcgctgttagcgggcccattaagttctgtctcggcgcgtctgcgtctggctggctggcataaatatctcactcgcaatcaaattcagccgatagcggaacgggaaggcgactggagtgccatgtccggttttcaacaaaccatgcaaatgctgaatgagggcatcgttcccactgcgatgctggttgccaacgatcagatggcgctgggcgcaatgcgcgccattaccgagtccgggctgcgcgttggtgcggatatctcggtagtgggatacgacgataccgaagacagctcatgttatatcccgccgtcaaccaccatcaaacaggattttcgcctgctggggcaaaccagcgtggaccgcttgctgcaactctctcagggccaggcggtgaagggcaatcagctgttgcccgtctcactggtgaaaagaaaaaccaccctggcgcccaatacgcaaaccgcctctccccgcgcgttggccgattcattaatgcagctggcacgacaggtttcccgactggaaagcgggcagtgagcgcaacgcaattaatgtgagttagcgcgaattgatctg

SEQ ID NO: 884 - DNA, 6620 bp, Artificial Sequence
  Description of Artificial Sequence: Synthetic polynucleotide
cgcggtatcattgcagcactggggccagatggtaagccctcccgtatcgtagttatctacacgacggggagtcaggcaactatggatgaacgaaatagacagatcgctgagataggtgcctcactgattaagcattggtaactgtcagaccaagtttactcatatatactttagattgatttaaaacttcatttttaatttaaaaggatctaggtgaagatcctttttgataatctcatgaccaaaatcccttaacgtgagttttcgttccactgagcgtcagaccccttaataagatgatcttcttgagatcgttttggtctgcgcgtaatctcttgctctgaaaacgaaaaaaccgccttgcagggcggtttttcgaaggttctctgagctaccaactctttgaaccgaggtaactggcttggaggagcgcagtcaccaaaacttgtcctttcagtttagccttaaccggcgcatgacttcaagactaactcctctaaatcaattaccagtggctgctgccagtggtgcttttgcatgtctttccgggttggactcaagacgatagttaccggataaggcgcagcggtcggactgaacggggggttcgtgcatacagtccagcttggagcgaactgcctacccggaactgagtgtcaggcgtggaatgagacaaacgcggccataacagcggaatgacaccggtaaaccgaaaggcaggaacaggagagcgcacgagggagccgccagggggaaacgcctggtatctttatagtcctgtcgggtttcgccaccactgatttgagcgtcagatttcgtgatgcttgtcaggggggcggagcctatggaaaaacggctttgccgcggccctctcacttccctgttaagtatcttcctggcatcttccaggaaatctccgccccgttcgtaagccatttccgctcgccgcagtcgaacgaccgagcgtagcgagtcagtgagcgaggaagcggaatatatcctgtatcacatattctgctgacgcaccggtgcagccttttttctcctgccacatgaagcacttcactgacaccctcatcagtgccaacatagtaagccagtatacactccgctagcgctgaggtctgcctcgtgaagaaggtgttgctgactcataccaggcctgaatcgccccatcatccagccagaaagtgagggagccacggttgatgagagctttgttgtaggtggaccagttggtgattttgaacttttgctttgccacggaacggtctgcgttgtcgggaagatgcgtgatctgatccttcaactcagcaaaagttcgatttattcaacaaagccacgttgtgtctcaaaatctctgatgttacattgcacaagataaaaatatatcatcatgaacaataaaactgtctgcttacataaacagtaatacaaggggtgttatgagccatattcaacgggaaacgtcttgctcgaggccgcgattaaattccaacatggatgctgatttatatgggtataaatgggctcgcgataatgtcgggcaatcaggtgcgacaatctatcgattgtatgggaagcccgatgcgccagagttgtttctgaaacatggcaaaggtagcgttgccaatgatgttacagatgagatggtcagactaaactggctgacggaatttatgcctcttccgaccatcaagcattttatccgtactcctgatgatgcatggttactcaccactgcgatccccgggaaaacagcattccaggtattagaagaatatcctgattcaggtgaaaatattgttgatgcgctggcagtgttcctgcgccggttgcattcgattcctgtttgtaattgtccttttaacagcgatcgcgtatttcgtctcgctcaggcgcaatcacgaatgaataacggtttggttgatgcgagtgattttgatgacgagcgtaatggctggcctgttgaacaagtctggaaagaaatgcataagcttttgccattctcaccggattcagtcgtcactcatggtgatttctcacttgataaccttatttttgacgaggggaaattaataggttgtattgatgttggacgagtcggaatcgcagaccgataccaggatcttgccatcctatggaactgcctcggtgagttttctccttcattacagaaacggctttttcaaaaatatggtattgataatcctgatatgaataaattgcagtttcatttgatgctcgatgagtttttctaatcagaattggttaattggttgtaacactggcagagcattacgctgacttgacgcggaagagccgatgcttgacgcggaagagccgatgccagtccagttacgctggagtctgaggctcgtcctgaatgatatcaagcttgattcgtctgtggtatggctgtgcaggtcgtaaatcactgcataattcgtgtcgctcaaggcgcactcccgttctggataatgttttttgcgccgacatcataacggttctggcaaatattctgaaatgagctgttgacaattaatcatccggctcgtataatgtgtggaattgtgagcggataacaatttcacacaggaaacagcgccgctgagaaaaagcgaagcggcactgctctttaacaatttatcagacaatctgtgtgggcactcgaccggaattatcgattaactttattattaaaaattaaagaggtatatattaatgtatcgattaaataaggaggaataaaccatggccggtacgggtcgtttggctggtaaaattgcattgatcaccggtggtgctggtaacattggttccgagctgacccgccgttttctggccgagggtgcgacggttattatcagcggccgtaaccgtgcgaagctgaccgcgctggccgagcgcatgcaagccgaggccggcgtgccggccaagcgcattgatttggaggtgatggatggttccgaccctgtggctgtccgtgccggtatcgaggcaatcgtcgctcgccacggtcagattgacattctggttaacaacgcgggctccgccggtgcccaacgtcgcttggcggaaattccgctgacggaggcagaattgggtccgggtgcggaggagactttgcacgcttcgatcgcgaatctgttgggcatgggttggcacctgatgcgtattgcggctccgcacatgccagttggctccgcagttatcaacgtttcgactattttctcgcgcgcagagtactatggtcgcattccgtacgttaccccgaaggcagcgctgaacgctttgtcccagctggctgcccgcgagctgggcgctcgtggcatccgcgttaacactattttcccaggtcctattgagtccgaccgcatccgtaccgtgtttcaacgtatggatcaactgaagggtcgcccggagggcgacaccgcccatcactttttgaacaccatgcgcctgtgccgcgcaaacgaccaaggcgctttggaacgccgctttccgtccgttggcgatgttgctgatgcggctgtgtttctggcttctgctgagagcgcggcactgtcgggtgagacgattgaggtcacccacggtatggaactgccggcgtgtagcgaaacctccttgttggcgcgtaccgatctgcgtaccatcgacgcgagcggtcgcactaccctgatttgcgctggcgatcaaattgaagaagttatggccctgacgggcatgctgcgtacgtgcggtagcgaagtgattatcggcttccgttctgcggctgccctggcgcaatttgagcaggcagtgaatgaatctcgccgtctggcaggtgcggatttcaccccgccgatcgctttgccgttggacccacgtgacccggccaccattgatgcggttttcgattggggcgcaggcgagaatacgggtggcatccatgcggcggtcattctgccggcaacctcccacgaaccggctccgtgcgtgattgaagtcgatgacgaacgcgtcctgaatttcctggccgatgaaattaccggcaccatcgttattgcgagccgtttggcgcgctattggcaatcccaacgcctgaccccgggtgcccgtgcccgcggtccgcgtgttatctttctgagcaacggtgccgatcaaaatggtaatgtttacggtcgtattcaatctgcggcgatcggtcaattgattcgcgtttggcgtcacgaggcggagttggactatcaacgtgcatccgccgcaggcgatcacgttctgccgccggtttgggcgaaccagattgtccgtttcgctaaccgctccctggaaggtctggagttcgcgtgcgcgtggaccgcacagctgctgcacagccaacgtcatattaacgaaattacgctgaacattccagccaatattagcgcgaccacgggcgcacgttccgccagcgtcggctgggccgagtccttgattggtctgcacctgggcaaggtggctctgattaccggtggttcggcgggcatcggtggtcaaatcggtcgtctgctggccttgtctggcgcgcgtgtgatgctggccgctcgcgatcgccataaattggaacagatgcaagccatgattcaaagcgaattggcggaggttggttataccgatgtggaggaccgtgtgcacatcgctccgggttgcgatgtgagcagcgaggcgcagctggcagatctggtggaacgtacgctgtccgcattcggtaccgtggattatttgattaataacgccggtattgcgggcgtggaggagatggtgatcgacatgccggtggaaggctggcgtcacaccctgtttgccaacctgatttcgaattattcgctgatgcgcaagttggcgccgctgatgaagaagcaaggtagcggttacatcctgaacgtttcttcctattttggcggtgagaaggacgcggcgattccttatccgaaccgcgccgactacgccgtctccaaggctggccaacgcgcgatggcggaagtgttcgctcgtttcctgggtccagagattcagatcaatgctattgccccaggtccggttgaaggcgaccgcctgcgtggtaccggtgagcgtccgggcctgtttgctcgtcgcgcccgtctgatcttggagaataaacgcctgaacgaattgcacgcggctttgattgctgcggcccgcaccgatgagcgctcgatgcacgagttggttgaattgttgctgccgaacgacgtggccgcgttggagcagaacccagcggcccctaccgcgctgcgtgagctggcacgccgcttccgtagcgaaggtgatccggcggcaagctcctcgtccgccttgctgaatcgctccatcgctgccaagctgttggctcgcttgcataacggtggctatgtgctgccggcggatatttttgcaaatctgcctaatccgccggacccgttctttacccgtgcgcaaattgaccgcgaagctcgcaaggtgcgtgatggtattatgggtatgctgtatctgcagcgtatgccaaccgagtttgacgtcgctatggcaaccgtgtactatctggccgatcgtaacgtgagcggcgaaactttccatccgtctggtggtttgcgctacgagcgtaccccgaccggtggcgagctgttcggcctgccatcgccggaacgtctggcggagctggttggtagcacggtgtacctgatcggtgaacacctgaccgagcacctgaacctgctggctcgtgcctatttggagcgctacggtgcccgtcaagtggtgatgattgttgagacggaaaccggtgcggaaaccatgcgtcgtctgttgcatgatcacgtcgaggcaggtcgcctgatgactattgtggcaggtgatcagattgaggcagcgattgaccaagcgatcacgcgctatggccgtccgggtccggtggtgtgcactccattccgtccactgccaaccgttccgctggtcggtcgtaaagactccgattggagcaccgttttgagcgaggcggaatttgcggaactgtgtgagcatcagctgacccaccatttccgtgttgctcgtaagatcgccttgtcggatggcgcgtcgctggcgttggttaccccggaaacgactgcgactagcaccacggagcaatttgctctggcgaacttcatcaagaccaccctgcacgcgttcaccgcgaccatcggtgttgagtcggagcgcaccgcgcaacgtattctgattaaccaggttgatctgacgcgccgcgcccgtgcggaagagccgcgtgacccgcacgagcgtcagcaggaattggaacgcttcattgaagccgttctgctggttaccgctccgctgcctcctgaggcagacacgcgctacgcaggccgtattcaccgcggtcgtgcgattaccgtctaatagaagcttggctgttttggcggatgagagaagattttcagcctgatacagattaaatcagaacgcagaagcggtctgataaaacagaatttgcctggcggcagtagcgcggtggtcccacctgaccccatgccgaactcagaagtgaaacgacgaattctctagatatcgctcaatactgaccatttaaatcatacctgacc

SEQ ID NO: 885 - DNA, 10944 bp, Artificial Sequence
  Description of Artificial Sequence: Synthetic polynucleotide
cgcggtatcattgcagcactggggccagatggtaagccctcccgtatcgtagttatctacacgacggggagtcaggcaactatggatgaacgaaatagacagatcgctgagataggtgcctcactgattaagcattggtaactgtcagaccaagtttactcatatatactttagattgatttaaaacttcatttttaatttaaaaggatctaggtgaagatcctttttgataatctcatgaccaaaatcccttaacgtgagttttcgttccactgagcgtcagaccccttaataagatgatcttcttgagatcgttttggtctgcgcgtaatctcttgctctgaaaacgaaaaaaccgccttgcagggcggtttttcgaaggttctctgagctaccaactctttgaaccgaggtaactggcttggaggagcgcagtcaccaaaacttgtcctttcagtttagccttaaccggcgcatgacttcaagactaactcctctaaatcaattaccagtggctgctgccagtggtgcttttgcatgtctttccgggttggactcaagacgatagttaccggataaggcgcagcggtcggactgaacggggggttcgtgcatacagtccagcttggagcgaactgcctacccggaactgagtgtcaggcgtggaatgagacaaacgcggccataacagcggaatgacaccggtaaaccgaaaggcaggaacaggagagcgcacgagggagccgccagggggaaacgcctggtatctttatagtcctgtcgggtttcgccaccactgatttgagcgtcagatttcgtgatgcttgtcaggggggcggagcctatggaaaaacggctttgccgcggccctctcacttccctgttaagtatcttcctggcatcttccaggaaatctccgccccgttcgtaagccatttccgctcgccgcagtcgaacgaccgagcgtagcgagtcagtgagcgaggaagcggaatatatcctgtatcacatattctgctgacgcaccggtgcagccttttttctcctgccacatgaagcacttcactgacaccctcatcagtgccaacatagtaagccagtatacactccgctagcgctgaggtctgcctcgtgaagaaggtgttgctgactcataccaggcctgaatcgccccatcatccagccagaaagtgagggagccacggttgatgagagctttgttgtaggtggaccagttggtgattttgaacttttgctttgccacggaacggtctgcgttgtcgggaagatgcgtgatctgatccttcaactcagcaaaagttcgatttattcaacaaagccacgttgtgtctcaaaatctctgatgttacattgcacaagataaaaatatatcatcatgaacaataaaactgtctgcttacataaacagtaatacaaggggtgttatgagccatattcaacgggaaacgtcttgctcgaggccgcgattaaattccaacatggatgctgatttatatgggtataaatgggctcgcgataatgtcgggcaatcaggtgcgacaatctatcgattgtatgggaagcccgatgcgccagagttgtttctgaaacatggcaaaggtagcgttgccaatgatgttacagatgagatggtcagactaaactggctgacggaatttatgcctcttccgaccatcaagcattttatccgtactcctgatgatgcatggttactcaccactgcgatccccgggaaaacagcattccaggtattagaagaatatcctgattcaggtgaaaatattgttgatgcgctggcagtgttcctgcgccggttgcattcgattcctgtttgtaattgtccttttaacagcgatcgcgtatttcgtctcgctcaggcgcaatcacgaatgaataacggtttggttgatgcgagtgattttgatgacgagcgtaatggctggcctgttgaacaagtctggaaagaaatgcataagcttttgccattctcaccggattcagtcgtcactcatggtgatttctcacttgataaccttatttttgacgaggggaaattaataggttgtattgatgttggacgagtcggaatcgcagaccgataccaggatcttgccatcctatggaactgcctcggtgagttttctccttcattacagaaacggctttttcaaaaatatggtattgataatcctgatatgaataaattgcagtttcatttgatgctcgatgagtttttctaatcagaattggttaattggttgtaacactggcagagcattacgctgacttgacgcggaagagccgatgccagtccagttacgctggagtctgaggctcgtcctgaatgatatcaagcttgattcgtctgtggtatggctgtgcaggtcgtaaatcactgcataattcgtgtcgctcaaggcgcactcccgttctggataatgttttttgcgccgacatcataacggttctggcaaatattctgaaatgagctgttgacaattaatcatccggctcgtataatgtgtggaattgtgagcggataacaatttcacacaggaaacagcgccgctgagaaaaagcgaagcggcactgctctttaacaatttatcagacaatctgtgtgggcactcgaccggaattatcgattaactttattattaaaaattaaagaggtatatattaatgtatcgattaaataaggaggaataaaccatggccggtacgggtcgtttggctggtaaaattgcattgatcaccggtggtgctggtaacattggttccgagctgacccgccgttttctggccgagggtgcgacggttattatcagcggccgtaaccgtgcgaagctgaccgcgctggccgagcgcatgcaagccgaggccggcgtgccggccaagcgcattgatttggaggtgatggatggttccgaccctgtggctgtccgtgccggtatcgaggcaatcgtcgctcgccacggtcagattgacattctggttaacaacgcgggctccgccggtgcccaacgtcgcttggcggaaattccgctgacggaggcagaattgggtccgggtgcggaggagactttgcacgcttcgatcgcgaatctgttgggcatgggttggcacctgatgcgtattgcggctccgcacatgccagttggctccgcagttatcaacgtttcgactattttctcgcgcgcagagtactatggtcgcattccgtacgttaccccgaaggcagcgctgaacgctttgtcccagctggctgcccgcgagctgggcgctcgtggcatccgcgttaacactattttcccaggtcctattgagtccgaccgcatccgtaccgtgtttcaacgtatggatcaactgaagggtcgcccggagggcgacaccgcccatcactttttgaacaccatgcgcctgtgccgcgcaaacgaccaaggcgctttggaacgccgctttccgtccgttggcgatgttgctgatgcggctgtgtttctggcttctgctgagagcgcggcactgtcgggtgagacgattgaggtcacccacggtatggaactgccggcgtgtagcgaaacctccttgttggcgcgtaccgatctgcgtaccatcgacgcgagcggtcgcactaccctgatttgcgctggcgatcaaattgaagaagttatggccctgacgggcatgctgcgtacgtgcggtagcgaagtgattatcggcttccgttctgcggctgccctggcgcaatttgagcaggcagtgaatgaatctcgccgtctggcaggtgcggatttcaccccgccgatcgctttgccgttggacccacgtgacccggccaccattgatgcggttttcgattggggcgcaggcgagaatacgggtggcatccatgcggcggtcattctgccggcaacctcccacgaaccggctccgtgcgtgattgaagtcgatgacgaacgcgtcctgaatttcctggccgatgaaattaccggcaccatcgttattgcgagccgtttggcgcgctattggcaatcccaacgcctgaccccgggtgcccgtgcccgcggtccgcgtgttatctttctgagcaacggtgccgatcaaaatggtaatgtttacggtcgtattcaatctgcggcgatcggtcaattgattcgcgtttggcgtcacgaggcggagttggactatcaacgtgcatccgccgcaggcgatcacgttctgccgccggtttgggcgaaccagattgtccgtttcgctaaccgctccctggaaggtctggagttcgcgtgcgcgtggaccgcacagctgctgcacagccaacgtcatattaacgaaattacgctgaacattccagccaatattagcgcgaccacgggcgcacgttccgccagcgtcggctgggccgagtccttgattggtctgcacctgggcaaggtggctctgattaccggtggttcggcgggcatcggtggtcaaatcggtcgtctgctggccttgtctggcgcgcgtgtgatgctggccgctcgcgatcgccataaattggaacagatgcaagccatgattcaaagcgaattggcggaggttggttataccgatgtggaggaccgtgtgcacatcgctccgggttgcgatgtgagcagcgaggcgcagctggcagatctggtggaacgtacgctgtccgcattcggtaccgtggattatttgattaataacgccggtattgcgggcgtggaggagatggtgatcgacatgccggtggaaggctggcgtcacaccctgtttgccaacctgatttcgaattattcgctgatgcgcaagttggcgccgctgatgaagaagcaaggtagcggttacatcctgaacgtttcttcctattttggcggtgagaaggacgcggcgattccttatccgaaccgcgccgactacgccgtctccaaggctggccaacgcgcgatggcggaagtgttcgctcgtttcctgggtccagagattcagatcaatgctattgccccaggtccggttgaaggcgaccgcctgcgtggtaccggtgagcgtccgggcctgtttgctcgtcgcgcccgtctgatcttggagaataaacgcctgaacgaattgcacgcggctttgattgctgcggcccgcaccgatgagcgctcgatgcacgagttggttgaattgttgctgccgaacgacgtggccgcgttggagcagaacccagcggcccctaccgcgctgcgtgagctggcacgccgcttccgtagcgaaggtgatccggcggcaagctcctcgtccgccttgctgaatcgctccatcgctgccaagctgttggctcgcttgcataacggtggctatgtgctgccggcggatatttttgcaaatctgcctaatccgccggacccgttctttacccgtgcgcaaattgaccgcgaagctcgcaaggtgcgtgatggtattatgggtatgctgtatctgcagcgtatgccaaccgagtttgacgtcgctatggcaaccgtgtactatctggccgatcgtaacgtgagcggcgaaactttccatccgtctggtggtttgcgctacgagcgtaccccgaccggtggcgagctgttcggcctgccatcgccggaacgtctggcggagctggttggtagcacggtgtacctgatcggtgaacacctgaccgagcacctgaacctgctggctcgtgcctatttggagcgctacggtgcccgtcaagtggtgatgattgttgagacggaaaccggtgcggaaaccatgcgtcgtctgttgcatgatcacgtcgaggcaggtcgcctgatgactattgtggcaggtgatcagattgaggcagcgattgaccaagcgatcacgcgctatggccgtccgggtccggtggtgtgcactccattccgtccactgccaaccgttccgctggtcggtcgtaaagactccgattggagcaccgttttgagcgaggcggaatttgcggaactgtgtgagcatcagctgacccaccatttccgtgttgctcgtaagatcgccttgtcggatggcgcgtcgctggcgttggttaccccggaaacgactgcgactagcaccacggagcaatttgctctggcgaacttcatcaagaccaccctgcacgcgttcaccgcgaccatcggtgttgagtcggagcgcaccgcgcaacgtattctgattaaccaggttgatctgacgcgccgcgcccgtgcggaagagccgcgtgacccgcacgagcgtcagcaggaattggaacgcttcattgaagccgttctgctggttaccgctccgctgcctcctgaggcagacacgcgctacgcaggccgtattcaccgcggtcgtgcgattaccgtctaatagaagcttggctgttttggcggatgagagaagattttcagcctgatacagattaaatcagaacgcagaagcggtctgataaaacagaatttgcctggcggcagtagcgcggtggtcccacctgaccccatgccgaactcagaagtgaaacgacgaattctctagaaagtataggaacttctgaaggggggacagctgtctcaaatgtctcggaatcgctgacgattcccaggtttctccggcaagcatagcgcatggcgtctccatgcgagaatgtcgcgcttgccggataaaaggggagccgctatcggaatggacgcaagccacggccgcagcaggtgcggtcgagggcttccagccagttccagggcagatgtgccggcagaccctcccgctttgggggaggcgcaagccgggtccattcggatagcatctccccatgcaaagtgccggccagggcaatgcccggagccggttcgaggcgccggtttgaataaatgacaaaaagcaaagcctttgtgccgatgaatctctatactgtttcacagacctgctgccctgcggggcggccatcttcctttattcgcttataagcgcggggcaggaggaaaaacatgtccctgaacttcctggacttcgagcagccgattgcagaactggaagcgaagattgacagcctgaccgcggttagccgtcaagatgagaaactggacattaacatcgacgaagaggtccaccgtttgcgtgagaagtctgttgaactgactcgcaaaatctttgctgatttgggcgcatggcagattgcccagttggctcgccacccacaacgcccatataccctggactacgtgcgcctggcgtttgacgagttcgacgaactggcaggcgaccgcgcctatgcggacgataaagcaattgtcggcggtattgctcgtttggatggccgtccggtgatgattatcggccatcaaaaaggccgcgagacgaaagaaaagattcgtcgtaactttggtatgccggcaccggagggctaccgcaaggccctgcgtctgatgcaaatggccgaacgctttaagatgccgattatcacgttcattgatacgccgggtgcgtacccaggcgttggtgcggaagagcgtggtcagagcgaggccatcgcacgtaacctgcgtgagatgtctcgtctgggtgtgccggtcgtttgcaccgtgattggcgagggcggtagcggtggtgcgttggcgatcggtgtcggtgataaggtcaacatgctgcaatacagcacgtacagcgtcattagcccggaaggttgcgcttccattctgtggaagagcgcggataaagcaccattggcagcggaagcgatgggtatcatcgcaccgcgtctgaaagaactgaagttgattgattctatcatcccggaaccgctgggcggtgctcaccgtaatccggaggcgatggcagccagcctgaaggcccagctgctggcggacctggcggatctggacgtgctgagcacggaggatctgaaaaaccgtcgctatcagcgcttgatgagctatggctacgcgtagtaaaggaggaaaatcatgagctggattgaacgcattaagtccaatatcaccccgacccgcaaggcgagcatccctgaaggcgtctggaccaaatgcgatagctgcggtcaggttttgtatcgtgcggagctggagcgtaacctggaagtgtgcccgaaatgcgaccatcacatgcgtatgaccgctcgtaatcgtctgcatagcctgctggatgagggcagcctggtcgagctgggtagcgaactggaaccgaaagatgttctgaaattccgtgattccaagaagtataaggatcgtttggcatctgcacaaaaagaaaccggtgagaaggacgcactggttgttatgaaaggcaccctgtatggtatgccggttgttgctgcggcgttcgagtttgcgtttatgggtggcagcatgggttccgtggtgggcgcacgctttgtgcgtgccgtggagcaggcgctggaggataactgtcctctgatttgtttcagcgcgagcggtggtgcgcgtatgcaagaggccctgatgagcctgatgcagatggcaaaaacctcggcagccctggcgaagatgcaagaacgcggcctgccgtacatttccgtcctgaccgaccctacgatgggcggtgtcagcgccagctttgcgatgctgggtgatttgaacatcgcagagccgaaggctctgattggttttgctggtccgcgtgttattgaacagacggttcgcgaaaagttgccgcctggtttccagcgcagcgagttcctgattgagaaaggtgccatcgacatgatcgttcgccgtccagaaatgcgtctgaaactggcgagcattctggcgaaattgatgaatctgccggctccgaatcctgaagcaccgcgtgagggtgtcgtggttccgccggtcccggaccaagagccggaggcataatagcacgtggagttaaccacgcggcttgccaacggggtctgaatcgctttttttgtatataatgcgtgtgaaatttcataccacaggcgaaggaggaaaaaccatggacattcgtaagatcaagaaactgattgaactggttgaagaaagcggcatcagcgagctggagatcagcgaaggtgaagagagcgtccgtatttcccgtgcggcaccggcagcgagctttccggttatgcagcaagcatacgccgctccgatgatgcaacagccggcacagagcaacgccgctgcaccggcgaccgttccaagcatggaggcaccggcagcggccgagatttcgggtcatatcgtgcgtagcccgatggtgggcaccttctatcgcacgccgtcgccggacgcaaaagccttcatcgaagtcggccagaaggtcaatgtcggcgacacgctgtgtatcgttgaggcaatgaaaatgatgaaccagattgaagcggataagagcggtactgttaaagcgatcctggtggaatccggccagcctgttgagttcgatgaaccgctggttgtgatcgagtaacgaggcgaacatgttggacaagatcgtgattgcaaaccgcggtgaaatcgcgctgcgtatcttgcgcgcgtgtaaagagctgggcattaagactgttgccgtgcattccagcgcagaccgcgacctgaagcatgttctgctggccgacgaaacggtttgcatcggtccggcaccgagcgtgaaaagctatctgaacatcccggccatcatctctgcggcagagatcaccggtgcagtggcgattcatccgggctacggtttcctgagcgagaacgctaactttgctgaacaagtggagcgtagcggtttcatcttcattggccctaaggcggagacgattcgcctgatgggcgacaaagtgagcgccattgcagcgatgaaaaaggccggtgtgccgtgtgttccgggcagcgatggtccgctgggtgacgatatggacaagaaccgtgccatcgctaaacgtattggctacccggtcattatcaaagcctctggtggtggcggtggccgtggtatgcgtgtcgtccgtggtgatgcggaactggcgcaaagcatcagcatgacccgtgcggaagccaaagcggcgttctctaacgatatggtgtatatggagaagtatctggagaatccgcgccacgttgaaatccaagttctggcggatggtcagggcaatgcgatctacttggcagaacgtgattgctccatgcaacgccgtcatcagaaggtggtggaagaggcaccggctccgggtattacgccggaactgcgtcgctacatcggtgagcgctgtgcgaaagcgtgtgtggacattggttaccgtggtgcgggtacgtttgagttcctgttcgaaaatggtgagttttacttcattgaaatgaatacccgcatccaggttgagcacccggtgaccgagatgattactggcgttgatctgatcaaagagcaactgcgcattgcggctggtcagccgctgtcgatcaagcaagaagaggtgcacgttcgtggtcacgcggtcgagtgccgtatcaatgcggaggacccgaatacctttctgccgagccctggtaagatcacgcgttttcacgcgccaggtggttttggcgttcgttgggagtctcacatctacgccggttacaccgtgccgccgtactatgacagcatgattggtaaactgatctgctatggcgaaaatcgtgatgtcgcgatcgcccgcatgaaaaacgcgctgcaagagctgatcattgatggcattaagaccaatgtggatttgcagatccgcattatgaacgacgagaatttccagcacggcggtacgaacattcactacctggaaaagaaactgggcctgcaagagaaataatagggtaccctagcataaccccttggggcctctaaacgggtcttgaggggttttttgaatcccccgggatgtctatcttaaggtagccaaagtttaaatcatacctgacc

SEQ ID NO: 886 - DNA, 1401 bp, Escherichia coli
atgccacattcctacgattacgatgccatagtaataggttccggccccggcggcgaaggcgctgcaatgggcctggttaagcaaggtgcgcgcgtcgcagttatcgagcgttatcaaaatgttggcggcggttgcacccactggggcaccatcccgtcgaaagctctccgtcacgccgtcagccgcattatagaattcaatcaaaacccactttacagcgaccattcccgactgctccgctcttcttttgccgatatccttaaccatgccgataacgtgattaatcaacaaacgcgcatgcgtcagggattttacgaacgtaatcactgtgaaatattgcagggaaacgctcgctttgttgacgagcatacgttggcgctggattgcccggacggcagcgttgaaacactaaccgctgaaaaatttgttattgcctgcggctctcgtccatatcatccaacagatgttgatttcacccatccacgcatttacgacagcgactcaattctcagcatgcaccacgaaccgcgccatgtacttatctatggtgctggagtgatcggctgtgaatatgcgtcgatcttccgcggtatggatgtaaaagtggatctgatcaacacccgcgatcgcctgctggcatttctcgatcaagagatgtcagattctctctcctatcacttctggaacagtggcgtagtgattcgtcacaacgaagagtacgagaagatcgaaggctgtgacgatggtgtgatcatgcatctgaagtcgggtaaaaaactgaaagctgactgcctgctctatgccaacggtcgcaccggtaataccgattcgctggcgttacagaacattgggctagaaactgacagccgcggacagctgaaggtcaacagcatgtatcagaccgcacagccacacgtttacgcggtgggcgacgtgattggttatccgagcctggcgtcggcggcctatgaccaggggcgcattgccgcgcaggcgctggtaaaaggcgaagccaccgcacatctgattgaagatatccctaccggtatttacaccatcccggaaatcagctctgtgggcaaaaccgaacagcagctgaccgcaatgaaagtgccatatgaagtgggccgcgcccagtttaaacatctggcacgcgcacaaatcgtcggcatgaacgtgggcacgctgaaaattttgttccatcgggaaacaaaagagattctgggtattcactgctttggcgagcgcgctgccgaaattattcatatcggtcaggcgattatggaacagaaaggtggcggcaacactattgagtacttcgtcaacaccacctttaactacccgacgatggcggaagcctatcgggtagctgcgttaaacggtttaaaccgcctgttttaa

SEQ ID NO: 887 - DNA, 8995 bp, Artificial Sequence; identical to SEQ ID NO: 881
  Description of Artificial Sequence: Synthetic polynucleotide

SEQ ID NO: 888 - protein, 415 aa, Escherichia coli
MALNIPFRNAYYRFASSYSFLFFISWSLWWSLYAIWLKGHLGLTGTELGTLYSVNQFTSILFMMFYGIVQDKLGLKKPLIWCMSFILVLTGPFMIYVYEPLLQSNFSVGLILGALFFGLGYLAGCGLLDSFTEKMARNFHFEYGTARAWGSFGYAIGAFFAGIFFSISPHINFWLVSLFGAVFMMINMRFKDKDHQCIAADAGGVKKEDFIAVFKDRNFWVFVIFIVGTWSFYNIFDQQLFPVFYAGLFESHDVGTRLYGYLNSFQVVLEALCMAIIPFFVNRVGPKNALLIGVVIMALRILSCALFVNPWIISLVKLLHAIEVPLCVISVFKYSVANFDKRLSSTIFLIGFQIASSLGIVLLSTPTGILFDHAGYQTVFFAISGIVCLMLLFGIFFLSKKREQIVMETPVPSAI

SEQ ID NO: 889 - protein, 307 aa, Escherichia coli
MSAKVWVLGDAVVDLLPESDGRLLPCPGGAPANVAVGIARLGGTSGFIGRVGDDPFGALMQRTLLTEGVDITYLKQDEWHRTSTVLVDLNDQGERSFTFMVRPSADLFLETTDLPCWRHGEWLHLCSIALSAEPSRTSAFTAMTAIRHAGGFVSFDPNIREDLWQDEHLLRLCLRQALQLADVVKLSEEEWRLISGKTQNDRDICALAKEYEIAMLLVTKGAEGVVVCYRGQVHHFAGMSVNCVDSTGAGDAFVAGLLTGLSSTGLSTDEREMRRIIDLAQRCGALAVTAKGAMTALPCRQELESEK

SEQ ID NO: 890 - protein, 477 aa, Escherichia coli
MTQSRLHAAQNALAKLHERRGNTFYPHFHLAPPAGWMNDPNGLIWFNDRYHAFYQHHPMSEHWGPMHWGHATSDDMIHWQHEPIALAPGDENDKDGCFSGSAVDDNGVLSLIYTGHVWLDGAGNDDAIREVQCLATSRDGIHFEKQGVILTPPEGIMHFRDPKVWREADTWWMVVGAKDPGNTGQILLYRGSSLREWTFDRVLAHADAGESYMWECPDFFSLGDQHYLMFSPQGMNAEGYSYRNRFQSGVIPGMWSPGRLFAQSGHFTELDNGHDFYAPQSFVAKDGRRIVIGWMDMWESPMPSKREGWAGCMTLARELSESNGKLLQRPVHEAESLRQQHQSISPRTISNKYVLQENAQAVEIQLQWALKNSDAEHYGLQLGAGMRLYIDNQSERLVLWRYYPHENLDGYRSIPLPQGDMLALRIFIDTSSVEVFINDGEAVMSSRIYPQPEERELSLYASHGVAVLQHGALWQLG

SEQ ID NO: 891 - DNA, 3847 bp, Artificial Sequence
  Description of Artificial Sequence: Synthetic polynucleotide
tcacctcctaactacttaaaattgctatcattcgttattgttatctagttgtgcaaaacattgacatccctatcagtgatagatataatgagcacatgcccaccggcagctgccggtgggccgtattttggatgataacaggaggcaaaaccatggccctgaacatcccattccgcaacgcatactaccgcttcgcaagcagctacagcttcctgttcttcatttcctggagcttgtggtggtcgctgtatgctatctggctgaaaggtcatctgggcttgacgggtacggaactgggtaccctgtattccgttaatcaatttacgtccatcctgtttatgatgttttacggcatcgtgcaggataagctgggcctgaagaaaccgctgatctggtgtatgagcttcatcctggttctgaccggtccgtttatgatttacgtgtacgaaccgctgctgcagtccaactttagcgtgggcctgatcctgggtgcgttgtttttcggcttgggttacctggccggttgtggtctgctggatagctttacggaaaagatggcgcgtaactttcactttgaatatggtaccgcgcgtgcgtggggttcgttcggctacgctatcggcgcgttcttcgccggcattttcttcagcattagcccgcacatcaatttctggctggttagcctgttcggtgcggtctttatgatgatcaacatgcgttttaaggacaaggatcaccagtgtattgcagcggatgctggtggtgttaagaaagaggactttattgcagttttcaaagatcgcaacttctgggtgttcgtgatcttcattgtcggtacctggtccttttacaatatcttcgatcagcaactgtttccggttttctatgcgggcctgttcgaaagccacgatgttggcacgcgtctgtacggttatctgaatagctttcaagtcgtcctggaagctctgtgtatggcgatcattccgttctttgttaaccgtgtaggcccgaaaaatgcgttgctgattggcgttgtgattatggcactgcgtatcctgagctgcgcactgtttgtgaatccgtggatcattagcctggtgaaactgctgcacgctattgaagtcccgctgtgtgtcatctctgttttcaagtattccgtcgcgaacttcgacaagcgtttgtccagcaccatcttcctgatcggtttccaaattgcaagcagcctgggtattgttctgttgagcacgccgactggtattttgtttgatcacgctggttatcagactgtgttctttgcgatctcgggtatcgtttgcttgatgctgctgttcggtatctttttcctgtctaagaaacgcgagcaaattgttatggaaaccccggttcctagcgcgatctaaggaggtaatacacatgtcagcgaaagtatgggtcctgggcgacgcagtagtagatctgttgccggaaagcgacggtcgtctgctgccgtgtccgggtggtgcaccggctaatgttgcggtgggcatcgcgcgtctgggtggtacctcgggttttatcggtcgcgtgggtgacgaccctttcggtgcgctgatgcagcgcactttgctgaccgagggtgtggatatcacgtatctgaagcaggatgagtggcatcgtacctctaccgtcctggtggacctgaatgaccagggtgaacgtagcttcaccttcatggtgcgcccgagcgccgatttgtttctggaaacgaccgatctgccgtgttggcgtcacggcgagtggctgcacttgtgtagcattgcactgtctgcggaaccgtcgcgcacgagcgccttcaccgcgatgacggcaatccgccatgcaggtggctttgtctccttcgacccgaacattcgtgaggatctgtggcaggacgagcacctgttgcgcctgtgcctgcgtcaagcactgcagttggccgacgttgtaaaactgtccgaagaagagtggcgtctgatctctggtaaaacgcagaatgaccgcgatatttgtgcgctggctaaagagtatgagatcgccatgttgctggtgacgaagggtgccgaaggtgttgttgtgtgctatcgtggtcaggtgcaccattttgcaggcatgtccgtgaattgcgtggattctacgggcgcaggcgatgcgttcgtcgcgggtctgttgaccggtctgagcagcaccggcctgtcgaccgatgaacgtgaaatgcgtcgtatcattgacctggcgcagcgttgcggtgccttggcggttaccgcaaagggtgccatgaccgcattgccgtgccgtcaggagctggaaagcgagaaataaggaggtaatactcatgactcaatcccgcctgcacgcagcacaaaacgcactggcaaagctgcatgagcgtcgtggtaacaccttctacccacacttccacctggcgccacctgcgggttggatgaacgatccgaacggcctgatttggttcaacgaccgttaccatgcgttctatcaacaccaccctatgtccgagcattggggtccgatgcattggggccacgctaccagcgatgacatgatccattggcagcacgagccgattgccctggcaccgggtgatgagaacgacaaggatggttgcttcagcggttctgctgtcgatgataacggtgtcctgtctctgatctacaccggtcatgtctggctggatggcgctggcaatgacgacgcaatccgtgaagttcaatgcctggcgacctcgcgtgacggcattcacttcgagaaacagggcgtcattttgacgccgcctgagggtatcatgcactttcgcgacccaaaagtttggcgtgaagcggacacgtggtggatggtcgtcggcgcgaaagacccgggtaacacgggtcagattctgctgtatcgtggcagcagcctgcgtgagtggaccttcgaccgcgtcctggcccatgctgatgcgggcgagagctatatgtgggaatgcccagacttcttttctctgggcgaccaacattatctgatgttcagcccgcaaggcatgaatgcggagggctacagctaccgtaaccgctttcagagcggcgttatcccgggtatgtggagcccaggtcgcctgtttgctcagtccggtcattttaccgagctggacaatggtcacgatttctatgcaccgcaatcgttcgtggcgaaagatggccgtcgcatcgttattggttggatggatatgtgggaaagcccgatgccgagcaagcgtgagggttgggcgggttgcatgaccctggcccgtgagctgagcgagagcaatggcaaattgctgcaacgcccggtgcacgaggcagaaagcctgcgccagcaacaccaaagcatcagccctcgtaccattagcaacaaatacgttctgcaggaaaatgcgcaggccgttgagattcaactgcaatgggccctgaaaaacagcgacgcggagcattacggcctgcagctgggtgcgggcatgcgtttgtacattgataatcaaagcgagcgtttggttttgtggcgctactacccgcatgagaacctggacggctaccgtagcatcccgctgccgcagggtgacatgctggcgctgcgtattttcattgatactagcagcgtcgaggtattcatcaatgacggcgaagccgtgatgtctagccgtatttacccgcagccggaggaacgcgagctgagcttgtatgccagccacggtgtcgcggtgctgcaacacggtgcactgtggcaactgggttaagcttcagtagcgctgtctggcaacataaacggccccttctgggcaatgccgatcagttaagga

SEQ ID NO: 892 - DNA, 1242 bp, Escherichia coli
gtgtctaagcgtcgtgtagttgtgaccggactgggcatgttgtctcctgtcggcaataccgtagagtctacctggaaagctctgcttgccggtcagagtggcatcagcctaatcgaccatttcgatactagcgcctatgcaacgaaatttgctggcttagtaaaggattttaactgtgaggacattatctcgcgcaaagaacagcgcaagatggatgccttcattcaatatggaattgtcgctggcgttcaggccatgcaggattctggccttgaaataacggaagagaacgcaacccgcattggtgccgcaattggctccgggattggcggcctcggactgatcgaagaaaaccacacatctctgatgaacggtggtccacgtaagatcagcccattcttcgttccgtcaacgattgtgaacatggtggcaggtcatctgactatcatgtatggcctgcgtggcccgagcatctctatcgcgactgcctgtacttccggcgtgcacaacattggccatgctgcgcgtattatcgcgtatggcgatgctgacgtgatggttgcaggtggcgcagagaaagccagtacgccgctgggcgttggtggttttggcgcggcacgtgcattatctacccgcaatgataacccgcaagcggcgagccgcccgtgggataaagagcgtgatggtttcgtactgggcgatggtgccggtatgctggtacttgaagagtacgaacacgcgaaaaaacgcggtgcgaaaatttacgctgaactcgtcggctttggtatgagcagcgatgcttatcatatgacgtcaccgccagaaaatggcgcaggcgcagctctggcgatggcaaatgctctgcgtgatgcaggcattgaagcgagtcagattggctacgttaacgcgcacggtacttctacgccggctggcgataaagctgaagcgcaggcggtgaaaaccatcttcggtgaagctgcaagccgtgtgttggtaagctccacgaaatctatgaccggtcacctgttaggtgcggcgggtgcagtagaatctatctactccatcctggcgctgcgcgatcaggctgttccgccaaccatcaacctggataacccggatgaaggttgcgatctggatttcgtaccgcacgaagcgcgtcaggttagcggaatggaatacactctgtgtaactccttcggcttcggtggcactaatggttctttgatctttaaaaagatctaa

SEQ ID NO: 893 - DNA, 1221 bp, Artificial Sequence
  Description of Artificial Sequence: Synthetic polynucleotide
atgaaacgtgcagtgattactggcctgggcattgtttccagcatcggtaataaccagcaggaagtcctggcatctctgcgtgaaggacgttcagggatcactttctctcaggagctgaaggattccggcatgcgtagccacgtctggggcaacgtaaaactggataccactggcctcattgaccgcaaagttgtgcgctttatgagcgacgcatccatttatgcattcctttctatggagcaggcaatcgctgatgcgggcctctctccggaagcttaccagaataacccgcgcgttggcctgattgcaggttccggcggcggctccccgcgtttccaggtgttcggcgctgacgcaatgcgcggcccgcgcggcctgaaagcggttggcccgtatgtggtcaccaaagcgatggcatccggcgtttctgcctgcctcgccaccccgtttaaaattcatggcgttaactactccatcagctccgcgtgtgcgacttccgcacactgtatcggtaacgcagtagagcagatccaactgggcaaacaggacatcgtgtttgctggcggcggcgaagagctgtgctgggaaatggcttgcgaattcgacgcaatgggtgcgctgtctactaaatacaacgacaccccggaaaaagcctcccgtacttacgacgctcaccgtgacggtttcgttatcgctggcggcggcggtatggtagtggttgaagagctggaacacgcgctggcgcgtggtgctcacatctatgctgaaatcgttggctacggcgcaacctctgatggtgcagacatggttgctccgtctggcgaaggcgcagtacgctgcatgaagatggcgatgcatggcgttgataccccaatcgattacctgaactcccacggtacttcgactccggttggcgacgtgaaagagctggcagctatccgtgaagtgttcggcgataagagcccggcgatttctgcaaccaaagtcatgaccggtcactctctgggcgctgctggcgtacaggaagctatctactctctgctgatgctggaacacggctttatcgccccgagcatcaacattgaagagctggacgagcaggctgcgggtctgaacatcgtgaccgaaacgaccgatcgcgaactgaccaccgttatgtctaacagcttcggcttcggcggcaccaacgccacgctggtaatgcgcaagctgaaagattaa

SEQ ID NO: 894 - DNA, 2503 bp, Artificial Sequence
  Description of Artificial Sequence: Synthetic polynucleotide
cttacaggcggtggctcgatcttagcgatgtgtgtaaggctgcgcaaatttctctattaaatggctgatcggacttgttcggcgtacaagtgtacgctattgtgcattcgaaacttactctatgtgcgacttacagaggtattgaatgaaacgtgcagtgattactggcctgggcattgtttccagcatcggtaataaccagcaggaagtcctggcatctctgcgtgaaggacgttcagggatcactttctctcaggagctgaaggattccggcatgcgtagccacgtctggggcaacgtaaaactggataccactggcctcattgaccgcaaagttgtgcgctttatgagcgacgcatccatttatgcattcctttctatggagcaggcaatcgctgatgcgggcctctctccggaagcttaccagaataacccgcgcgttggcctgattgcaggttccggcggcggctccccgcgtttccaggtgttcggcgctgacgcaatgcgcggcccgcgcggcctgaaagcggttggcccgtatgtggtcaccaaagcgatggcatccggcgtttctgcctgcctcgccaccccgtttaaaattcatggcgttaactactccatcagctccgcgtgtgcgacttccgcacactgtatcggtaacgcagtagagcagatccaactgggcaaacaggacatcgtgtttgctggcggcggcgaagagctgtgctgggaaatggcttgcgaattcgacgcaatgggtgcgctgtctactaaatacaacgacaccccggaaaaagcctcccgtacttacgacgctcaccgtgacggtttcgttatcgctggcggcggcggtatggtagtggttgaagagctggaacacgcgctggcgcgtggtgctcacatctatgctgaaatcgttggctacggcgcaacctctgatggtgcagacatggttgctccgtctggcgaaggcgcagtacgctgcatgaagatggcgatgcatggcgttgataccccaatcgattacctgaactcccacggtacttcgactccggttggcgacgtgaaagagctggcagctatccgtgaagtgttcggcgataagagcccggcgatttctgcaaccaaagtcatgaccggtcactctctgggcgctgctggcgtacaggaagctatctactctctgctgatgctggaacacggctttatcgccccgagcatcaacattgaagagctggacgagcaggctgcgggtctgaacatcgtgaccgaaacgaccgatcgcgaactgaccaccgttatgtctaacagcttcggcttcggcggcaccaacgccacgctggtaatgcgcaagctgaaagattaattcgcagtaggtcggagtagacgcgccagcgtcgcatccgacgttacgcgccaatgcggcctccggcactaacgcatttaaataggcctggcgctagatcagtttaaacataacttcgtatagcatacattatacgaagttattgttgacaattaatcatcggcatagtatatcggcatagtataatacgacaaggtgaggaactaaaccatggccaagcctttgtctcaagaagaatccaccctcattgaaagagcaacggctacaatcaacagcatccccatctctgaagactacagcgtcgccagcgcagctctctctagcgacggccgcatcttcactggtgtcaatgtatatcattttactgggggaccttgtgcagaactcgtggtgctgggcactgctgctgctgcggcagctggcaacctgacttgtatcgtcgcgatcggaaatgagaacaggggcatcttgagcccctgcggacggtgccgacaggtgcttctcgatctgcatcctgggatcaaagccatagtgaaggacagtgatggacagccgacggcagttgggattcgtgaattgctgccctctggttatgtgtgggagggctaaataacttcgtatagcatacattatacgaagttatagatctgtcgacgggaacctgatggttccctttttcacatcattgacaatcgccgccagttccaggcaaacttcccgctttgtcgatttccttctgaaaagacgtacgcgttaaatcctgccaacgcaccgtaaccctgaaaccagagagatgagacggggatactcctcgccttgcgctgcattctggagtaatgcatgactgctgtaagccaaaccgaaacacgatcttctgccaatttttcgctcttccgcatcgcttttgcggtttttctcacctacatgaccgtagggttgccgttgccggttatcccgctgtttgttcatcatgaactgggctatggcaataccatggtcggcattgccgtcgggattcagtttctggctacggtgctgacgcgtggttacgccgggcgactggccgatcaatatggtgcaaaacgttcggcgcttcagggaatgttagcttgtggtctggctggcggcgcgttgctg

SEQ ID NO: 895 - DNA, 3651 bp, Artificial Sequence
  Description of Artificial Sequence: Synthetic polynucleotide
atgagcaaagaaggtaatgcggccaaaggccgcctggagggtaaagtggccctgatcaccggtgcagctggcaacctgggtaatgaaattagccgcgcgtttgcccgtgagggtgcgttcgtggttatgaccggccgcacggaagaacgtatctctgcggcccgcgaacagctgattgcggataccggtgtcgccccggaacgtatcgacacggcggtgctggatggcggtaacccggactctattcgtgcagctatggccaaactgcgcaaagaatatggccgtattgatatcctgattaacaatgcaggttcagcaggtccgaaacagccgctgcataatgttccgctgtcgccgcaagaaatggaagcatgcggtgataccgaaacggtgcgcgacgcgatgctgaacatcctgggcgtgacctggaatatggctcgtattgttgcgccgatgatgccggtgggcggtgcaatggttaatatcagcaccatttttagccacacgcgctattacggccgtaccgcgtatgtcgtgccgaaagcggccctgaacgcactgagcaatcagctggcttctgaactgggcccgcgtggtattcgcgttaacaccgtctttccgggtccgatcgaaagtgatcgtattcgcacggtgttcgcagctatggatgaagttcagtcccaaccgaaagacaccacggcgaattactttaccggtcgtatggcactgacgcgtagcgtcaacggcaaagtggatggtaaaccgctgccgaatccgaaagacatcgcgggtacctgtctgttcctggccagtgaagaagcggccggcattgccggtgaagaagttgatgtcacccatggcctgtccgcaaaccgcacgtctgctagtacctatatgacgcgcccgtctatgcgtagtctggatggcgcgggtctgaacatcttcatcgtttcaggtgaaaactgggatgacgccctggtcgcagctcacaccctgatcggctcgggtgcaaaagtgcgcctgggcctggcacgtaacgctgatgttgcacaggctaatgcgcgtctgaaagcgcaaggcattggtgaagaactgaccgttacgcgttttaatcgcgccgaaccggacgcaatggaagatgctctggcggccttcagtggcgacgttgatggtgcgatcaccggcgccattatcctgccggtcaaaccgagcggtcattttacgggctctctgctggcagctgatgacgataccgtgacgaaattcatggataccgaactggtcggtgccattgcagtgtcccgttcactggcacgttactggcacggtcgtgaagatttgcagagcccgccgcgttgcgtttttatgaccaacccgggtgacccgctgggcaattccttcgcgtcagtgctgtcggccggtatcacgcagctgatccgtatttggcgcgatgaagaacgcgttcaagcaggcaacggtagtaccgaacatgcggtctggtccaatcagattgtgcgccacaccaacacggaagatgaaaatacccgttttgcaagcggccatgctacgcgcgtgctgttccgtgaacaacacatcgccgaaattgatctgaaactgccggcaaacatcagtgaagaaaccggttcccgcaaagcaatggtgggctttgctgaaaatattaccggtctgcatctgggcaaagttgcattcatcacgggcggtagtgctggtattggcggtcaggtggcacgtctgctggctctggcaggtgccaaagtgatgatggttgcacgtcgcgaatccgaactggtcgcggcacgtgatcgcatcgtgggtgaactgcaagacattggctttgcgggtgttgaacgtcgcgtcaaatatatggcggacattgatgtcagtgattttgcctccctggacaaagcggtggatgccaccctggaagaattcggccgtatcgactacctgattaacaatgcgggcgttgcaggtgctgaagacatggtcatcgatatggaaccggaagcctggcgcttcaccctggatgcaaacctgattagcaattatcatctgatgcagcgtgttgtcccgctgatgaaagaacaaggctctggttatgtcctgaacgtgagctcttactttggcggtgaaaaattcctggcggttgcctatccgaatcgcgccgattacggtctgagcaaagcgggccagcgtgccatggtggaagcattttctccgttcctgggcccggaagttcaatgcaacgcaattgctccgggtccggtcgacggtgatcgtctgtctggtaccggcggtaaaccgggcctgtttcagcgtcgcgcgaaactgatcctggaaaacaaacgcctgaatgctgtgtatagtgcggttatccatgccattcgtgaaggcggtgatgcagctaaaattctgacccgtctgagtcgcaattcgaccagcacgctgtcccacgatgcagaagcaccggaagaactgcgtaaactggcactggattttgctagccagggcgacggtctgtgtacctgggatcaatacctgctgacggacgcaatggctcagcgtctgctggtgcgtctgcaactgggcggttttctgctgggttcaaacgaatgggcctcgctgagttcctcagaacagacctggctgaaactgtcaccgccggacgataaaccgttcctgccggcggcccaagttgataaagtcgcgaatggcgtcggtaaaggcgtgatttcgcagctgcatctgggtgcaatgccgaccgaagccgaagttgcgcaagccacggtctttttcctggcagatcgcgctgtgtcaggtgaaacctttatgccgtcgggcggtctgcgtgttgaacgctcaaacaccgaacgcgaaatgttcggctcgccgaaacaggaacgtatcgataaaatgaaaggtaaaaccgtctggattatcggcgaacacctgagtgactatgtggcagctacgatcgaagaactggtgtccggttgcggcgttgcgaaagtggttctgattgccaaagataaaagcggtgaaaaagcggttcgtgaccagctgccgaatgacctgtctaaagatgcactggaagtgctgatcgctggtgatggcctggaagaagcgatggacgaagccctgggccattggggtaaaccgaccacggtgctgtcaatgccgggcgaaccgctgccggatcacctgtttgaaggcggtaacccgctgtcgaccaaagacttcgcacatatggtggaagctaatattacccgtcactatcgcgttacgcgtaaagcgtccctgtacgatggttgtcaggtcgtgctggttagcccggatgtcccgtacggttctgacggtccgggtgttgcactggctaactttgtcaaaacctctctgcatgcgttcaccgccacggtggcagttgaaaatgaacgcctggttcacgatgtcccggtgaaccagatcaatctgacgcgtcgcgtgtcgagcgaagaaccgcgtgacgcagatgaacatgctgaagaactgcgtcgctttacccgtgcagtgctgctggttggtgcaccgctgccggacgcacaggattcacgttatcgctcgaaaatttaccgcggcaccagcatgacggtg

SEQ ID NO: 896 - DNA, 2568 bp, Artificial Sequence; identical to SEQ ID NO: 868
  Description of Artificial Sequence: Synthetic polynucleotide

SEQ ID NO: 897 - DNA, 2172 bp, Artificial Sequence; identical to SEQ ID NO: 867
  Description of Artificial Sequence: Synthetic polynucleotide

SEQ ID NO: 898 - DNA, 657 bp, Escherichia coli
gtgaaagagattattgatggattccttaaattccagcgcgaggcatttccgaagcgggaagccttgtttaaacagctggcgacacagcaaagcccgcgcacactttttatctcctgctccgacagccgtctggtccctgagctggtgacgcaacgtgagcctggcgatctgttcgttattcgcaacgcgggcaatatcgtcccttcctacgggccggaacccggtggcgtttctgcttcggtggagtatgccgtcgctgcgcttcgggtatctgacattgtgatttgtggtcattccaactgtggcgcgatgaccgccattgccagctgtcagtgcatggaccatatgcctgccgtctcccactggctgcgttatgccgattcagcccgcgtcgttaatgaggcgcgcccgcattccgatttaccgtcaaaagctgcggcgatggtacgtgaaaacgtcattgctcagttggctaatttgcaaactcatccatcggtgcgcctggcgctcgaagaggggcggatcgccctgcacggctgggtctacgacattgaaagcggcagcatcgcagcttttgacggcgcaacccgccagtttgtgccactggccgctaatcctcgcgtttgtgccataccgctacgccaaccgaccgcagcg

SEQ ID NO: 899 - DNA, 468 bp, Escherichia coli
atgattcagtcacaaattaaccgcaatattcgtcttgatcttgccgatgccattttgctcagcaaagctaaaaaagatctctcatttgccgagattgccgacggcaccggtctggcagaagcctttgtaaccgcggctttgctgggtcagcaggcgcttcctgccgacgccgcccgcctggtcggggcgaagctggatctcgacgaagactccattctactgttgcagatgattccactgcgtggctgcattgatgaccgtattccaactgacccaacgatgtatcgtttctatgaaatgttgcaggtgtacggtacaaccctgaaagcgttggttcatgagaaatttggcgatggcattattagcgcgattaacttcaaactcgacgttaagaaagtggcggacccggaaggtggcgaacgtgcggtcatcaccttagatggtaaatatctgccgaccaaaccgttc

SEQ ID NO: 900 - DNA, 1230 bp, Escherichia coli
atggcaaaggtatcgctggagaaagacaagattaagtttctgctggtagaaggcgtgcaccaaaaggcgctggaaagccttcgtgcagctggttacaccaacatcgaatttcacaaaggcgcgctggatgatgaacaattaaaagaatccatccgcgatgcccacttcatcggcctgcgatcccgtacccatctgactgaagacgtgatcaacgccgcagaaaaactggtcgctattggctgtttctgtatcggaacaaaccaggttgatctggatgcggcggcaaagcgcgggatcccggtatttaacgcaccgttctcaaatacgcgctctgttgcggagctggtgattggcgaactgctgctgctattgcgcggcgtgccggaagccaatgctaaagcgcaccgtggcgtgtggaacaaactggcggcgggttcttttgaagcgcgcggcaaaaagctgggtatcatcggctacggtcatattggtacgcaattgggcattctggctgaatcgctgggaatgtatgtttacttttatgatattgaaaataaactgccgctgggcaacgccactcaggtacagcatctttctgacctgctgaatatgagcgatgtggtgagtctgcatgtaccagagaatccgtccaccaaaaatatgatgggcgcgaaagaaatttcactaatgaagcccggctcgctgctgattaatgcttcgcgcggtactgtggtggatattccggcgctgtgtgatgcgctggcgagcaaacatctggcgggggcggcaatcgacgtattcccgacggaaccggcgaccaatagcgatccatttacctctccgctgtgtgaattcgacaacgtccttctgacgccacacattggcggttcgactcaggaagcgcaggagaatatcggcctggaagttgcgggtaaattgatcaagtattctgacaatggctcaacgctctctgcggtgaacttcccggaagtctcgctgccactgcacggtgggcgtcgtctgatgcacatccacgaaaaccgtccgggcgtgctaactgcgctgaacaaaatcttcgccgagcagggcgtcaacatcgccgcgcaatatctgcaaacttccgcccagatgggttatgtggttattgatattgaagccgacgaagacgttgccgaaaaagcgctgcaggcaatgaaagctattccgggtaccattcgcgcccgtctgctgtac

SEQ ID NO: 901 - DNA, 1530 bp, Escherichia coli
atggcaattggcataccaagagaacggttaaccaatgaaacccgtgttgcagcaacgccaaaaacagtggaacagctgctgaaactgggttttaccgtcgcggtagagagcggcgcgggtcaactggcaagttttgacgataaagcgtttgtgcaagcgggcgctgaaattgtagaagggaatagcgtctggcagtcagagatcattctgaaggtcaatgcgccgttagatgatgaaattgcgttactgaatcctgggacaacgctggtgagttttatctggcctgcgcagaatccggaattaatgcaaaaacttgcggaacgtaacgtgaccgtgatggcgatggactctgtgccgcgtatctcacgcgcacaatcgctggacgcactaagctcgatggcgaacatcgccggttatcgcgccattgttgaagcggcacatgaatttgggcgcttctttaccgggcaaattactgcggccgggaaagtgccaccggcaaaagtgatggtgattggtgcgggtgttgcaggtctggccgccattggcgcagcaaacagtctcggcgcgattgtgcgtgcattcgacacccgcccggaagtgaaagaacaagttcaaagtatgggcgcggaattcctcgagctggattttaaagaggaagctggcagcggcgatggctatgccaaagtgatgtcggacgcgttcatcaaagcggaaatggaactctttgccgcccaggcaaaagaggtcgatatcattgtcaccaccgcgcttattccaggcaaaccagcgccgaagctaattacccgtgaaatggttgactccatgaaggcgggcagtgtgattgtcgacctggcagcccaaaacggcggcaactgtgaatacaccgtgccgggtgaaatcttcactacggaaaatggtgtcaaagtgattggttataccgatcttccgggccgtctgccgacgcaatcctcacagctttacggcacaaacctcgttaatctgctgaaactgttgtgcaaagagaaagacggcaatatcactgttgattttgatgatgtggtgattcgcggcgtgaccgtgatccgtgcgggcgaaattacctggccggcaccgccgattcaggtatcagctcagccgcaggcggcacaaaaagcggcaccggaagtgaaaactgaggaaaaatgtacctgctcaccgtggcgtaaatacgcgttgatggcgctggcaatcattctttttggctggatggcaagcgttgcgccgaaagaattccttgggcacttcaccgttttcgcgctggcctgcgttgtcggttattacgtggtgtggaatgtatcgcacgcgctgcatacaccgttgatgtcggtcaccaacgcgatttcagggattattgttgtcggagcactgttgcagattggccagggcggctgggttagcttccttagttttatcgcggtgcttatagccagcattaatattttcggtggcttcaccgtgactcagcgcatgctgaaaatgttccgcaaaaat

SEQ ID NO: 902 - DNA, 1386 bp, Escherichia coli
atgtctggaggattagttacagctgcatacattgttgccgcgatcctgtttatcttcagtctggccggtctttcgaaacatgaaacgtctcgccagggtaacaacttcggtatcgccgggatggcgattgcgttaatcgcaaccatttttggaccggatacgggtaatgttggctggatcttgctggcgatggtcattggtggggcaattggtatccgtctggcgaagaaagttgaaatgaccgaaatgccagaactggtggcgatcctgcatagcttcgtgggtctggcggcagtgctggttggctttaacagctatctgcatcatgacgcgggaatggcaccgattctggtcaatattcacctgacggaagtgttcctcggtatcttcatcggggcggtaacgttcacgggttcggtggtggcgttcggcaaactgtgtggcaagatttcgtctaaaccattgatgctgccaaaccgtcacaaaatgaacctggcggctctggtcgtttccttcctgctgctgattgtatttgttcgcacggacagcgtcggcctgcaagtgctggcattgctgataatgaccgcaattgcgctggtattcggctggcatttagtcgcctccatcggtggtgcagatatgccagtggtggtgtcgatgctgaactcgtactccggctgggcggctgcggctgcgggctttatgctcagcaacgacctgctgattgtgaccggtgcgctggtcggttcttcgggggctatcctttcttacattatgtgtgaggcgatgaaccgttcctttatcagcgttattgcgggtggtttcggcaccgacggctcttctactggcgatgatcaggaagtgggtgagcaccgcgaaatcaccgcagaagagacagcggaactgctgaaaaactcccattcagtgatcattactccggggtacggcatggcagtcgcgcaggcgcaatatcctgtcgctgaaattactgagaaattgcgcgctcgtggtattaatgtgcgtttcggtatccacccggtcgcggggcgtttgcctggacatatgaacgtattgctggctgaagcaaaagtaccgtatgacatcgtgctggaaatggacgagatcaatgatgactttgctgataccgataccgtactggtgattggtgctaacgatacggttaacccggcggcgcaggatgatccgaagagtccgattgctggtatgcctgtgctggaagtgtggaaagcgcagaacgtgattgtctttaaacgttcgatgaacactggctatgctggtgtgcaaaacccgctgttcttcaaggaaaacacccacatgctgtttggtgacgccaaagccagcgtggatgcaatcctgaaagctctg

SEQ ID NO: 903 - DNA, 1401 bp, Escherichia coli
atggccccacattcctacgattacgatgccatagtaataggttccggccccggcggcgaaggcgctgcaatgggcctggttaagcaaggtgcgcgcgtcgcagttatcgagcgttatcaaaatgttggcggcggttgcacccactggggcaccatcccgtcgaaagctctccgtcacgccgtcagccgcattatagaattcaatcaaaacccactttacagcgaccattcccgactgctccgctcttcttttgccgatatccttaaccatgccgataacgtgattaatcaacaaacgcgcatgcgtcagggattttacgaacgtaatcactgtgaaatattgcagggaaacgctcgctttgttgacgagcatacgttggcgctggattgcccggacggcagcgttgaaacactaaccgctgaaaaatttgttattgcctgcggctctcgtccatatcatccaacagatgttgatttcacccatccacgcatttacgacagcgactcaattctcagcatgcaccacgaaccgcgccatgtacttatctatggtgctggagtgatcggctgtgaatatgcgtcgatcttccgcggtatggatgtaaaagtggatctgatcaacacccgcgatcgcctgctggcatttctcgatcaagagatgtcagattctctctcctatcacttctggaacagtggcgtagtgattcgtcacaacgaagagtacgagaagatcgaaggctgtgacgatggtgtgatcatgcatctgaagtcgggtaaaaaactgaaagctgactgcctgctctatgccaacggtcgcaccggtaataccgattcgctggcgttacagaacattgggctagaaactgacagccgcggacagctgaaggtcaacagcatgtatcagaccgcacagccacacgtttacgcggtgggcgacgtgattggttatccgagcctggcgtcggcggcctatgaccaggggcgcattgccgcgcaggcgctggtaaaaggcgaagccaccgcacatctgattgaagatatccctaccggtatttacaccatcccggaaatcagctctgtgggcaaaaccgaacagcagctgaccgcaatgaaagtgccatatgaagtgggccgcgcccagtttaaacatctggcacgcgcacaaatcgtcggcatgaacgtgggcacgctgaaaattttgttccatcgggaaacaaaagagattctgggtattcactgctttggcgagcgcgctgccgaaattattcatatcggtcaggcgattatggaacagaaaggtggcggcaacactattgagtacttcgtcaacaccacctttaactacccgacgatggcggaagcctatcgggtagctgcgttaaacggtttaaaccgcctgttt

SEQ ID NO: 904 - DNA, 1242 bp, Escherichia coli
atgggatctaagcgtcgtgtagttgtgaccggactgggcatgttgtctcctgtcggcaataccgtagagtctacctggaaagctctgcttgccggtcagagtggcatcagcctaatcgaccatttcgatactagcgcctatgcaacgaaatttgctggcttagtaaaggattttaactgtgaggacattatctcgcgcaaagaacagcgcaagatggatgccttcattcaatatggaattgtcgctggcgttcaggccatgcaggattctggccttgaaataacggaagagaacgcaacccgcattggtgccgcaattggctccgggattggcggcctcggactgatcgaagaaaaccacacatctctgatgaacggtggtccacgtaagatcagcccattcttcgttccgtcaacgattgtgaacatggtggcaggtcatctgactatcatgtatggcctgcgtggcccgagcatctctatcgcgactgcctgtacttccggcgtgcacaacattggccatgctgcgcgtattatcgcgtatggcgatgctgacgtgatggttgcaggtggcgcagagaaagccagtacgccgctgggcgttggtggttttggcgcggcacgtgcattatctacccgcaatgataacccgcaagcggcgagccgcccgtgggataaagagcgtgatggtttcgtactgggcgatggtgccggtatgctggtacttgaagagtacgaacacgcgaaaaaacgcggtgcgaaaatttacgctgaactcgtcggctttggtatgagcagcgatgcttatcatatgacgtcaccgccagaaaatggcgcaggcgcagctctggcgatggcaaatgctctgcgtgatgcaggcattgaagcgagtcagattggctacgttaacgcgcacggtacttctacgccggctggcgataaagctgaagcgcaggcggtgaaaaccatcttcggtgaagctgcaagccgtgtgttggtaagctccacgaaatctatgaccggtcacctgttaggtgcggcgggtgcagtagaatctatctactccatcctggcgctgcgcgatcaggctgttccgccaaccatcaacctggataacccggatgaaggttgcgatctggatttcgtaccgcacgaagcgcgtcaggttagcggaatggaatacactctgtgtaactccttcggcttcggtggcactaatggttctttgatctttaaaaagatc

SEQ ID NO: 905 - DNA, 7999 bp, Artificial Sequence; identical to SEQ ID NO: 871
  Description of Artificial Sequence: Synthetic polynucleotide

SEQ ID NO: 906 - DNA, 5385 bp, Artificial Sequence
  Description of Artificial Sequence: Synthetic polynucleotide
  pTrc-pTrc_THNS Ligation of inverted Flaviolin into pTrc vector supplied by Invitrogen
gtttgacagcttatcatcgactgcacggtgcaccaatgcttctggcgtcaggcagccatcggaagctgtggtatggctgtgcaggtcgtaaatcactgcataattcgtgtcgctcaaggcgcactcccgttctggataatgttttttgcgccgacatcataacggttctggcaaatattctgaaatgagctgttgacaattaatcatccggctcgtataatgtgtggaattgtgagcggataacaatttcacacaggaaacagcgccgctgagaaaaagcgaagcggcactgctctttaacaatttatcagacaatctgtgtgggcactcgaccggaattatcgattaactttattattaaaaattaaagaggtatatattaatgtatcgattaaataaggaggaataaaccatgaccactctgtgccgccctagcgttagcgtcccggaacacgtgattaccatggaggaaacgctggaactggcgcgtcgtcgtcatacggatcatccgcagctgccgctggctttgcgtctgatcgagaataccggcgtgcgcactcgtcacattgttcagccaattgaggacacgctggagcatccgggtttcgaggaccgcaacaaagtctatgaacgtgaagccaagagccgcgttccggctgtgatccagcgtgccctggacgatgcagaactgctggctacggatattgatgttatcatctacgtgagctgcacgggttttatgatgccgagcctgaccgcgtggttgattaacgagatgggtttcgactccaccacccgtcaaatcccgattgcgcagctgggttgtgcagcgggtggtgcggcgatcaaccgtgcccatgatttttgcaccgcgtacccggaagccaatgcactgatcgtcgcttgcgaattctgtagcctgtgctatcagccgaccgacttgggtgtgggtagcttgctgtgcaacggtctgttcggcgatggcattgcagcggccgtggttcgcggtcgtggtggcaccggtgttcgcctggaacgtaatggttcttacctgattccgaaaaccgaagattggattatgtatgatgtgaaggcgacgggtttccattttctgctggacaagcgtgtcccggcgaccatggaaccgttggctccggcactgaaagagctggctggtgagcacggctgggacgccagcgatctggacttctacattgtgcacgcgggtggtccgcgtattctggatgacctgagcacctttctggaagtcgaccctcacgcattccgcttttcccgtgcaacgctgacggagtacggcaatatcgcaagcgcggttgttttggacgcactgcgtcgtctgttcgacgagggtggtgttgaggaaggcgcacgcggcttgctggcgggttttggtccgggtattactgcagaaatgagcctgggttgttggcagaccgccgatgttcgtcgcggcatccgccaagatgtgacccgcacggcggcacgtggcgttagccgccgtgtgcgtcaagcttggctgttttggcggatgagagaagattttcagcctgatacagattaaatcagaacgcagaagcggtctgataaaacagaatttgcctggcggcagtagcgcggtggtcccacctgaccccatgccgaactcagaagtgaaacgccgtagcgccgatggtagtgtggggtctccccatgcgagagtagggaactgccaggcatcaaataaaacgaaaggctcagtcgaaagactgggcctttcgttttatctgttgtttgtcggtgaacgctctcctgagtaggacaaatccgccgggagcggatttgaacgttgcgaagcaacggcccggagggtggcgggcaggacgcccgccataaactgccaggcatcaaattaagcagaaggccatcctgacggatggcctttttgcgtttctacaaactctttttgtttatttttctaaatacattcaaatatgtatccgctcatgagacaataaccctgataaatgcttcaataatattgaaaaaggaagagtatgagtattcaacatttccgtgtcgcccttattcccttttttgcggcattttgccttcctgtttttgctcacccagaaacgctggtgaaagtaaaagatgctgaagatcagttgggtgcacgagtgggttacatcgaactggatctcaacagcggtaagatccttgagagttttcgccccgaagaacgttttccaatgatgagcacttttaaagttctgctatgtggcgcggtattatcccgtgttgacgccgggcaagagcaactcggtcgccgcatacactattctcagaatgacttggttgagtactcaccagtcacagaaaagcatcttacggatggcatgacagtaagagaattatgcagtgctgccataaccatgagtgataacactgcggccaacttacttctgacaacgatcggaggaccgaaggagctaaccgcttttttgcacaacatgggggatcatgtaactcgccttgatcgttgggaaccggagctgaatgaagccataccaaacgacgagcgtgacaccacgatgcctgtagcaatggcaacaacgttgcgcaaactattaactggcgaactacttactctagcttcccggcaacaattaatagactggatggaggcggataaagttgcaggaccacttctgcgctcggcccttccggctggctggtttattgctgataaatctggagccggtgagcgtgggtctcgcggtatcattgcagcactggggccagatggtaagccctcccgtatcgtagttatctacacgacggggagtcaggcaactatggatgaacgaaatagacagatcgctgagataggtgcctcactgattaagcattggtaactgtcagaccaagtttactcatatatactttagattgatttaaaacttcatttttaatttaaaaggatctaggtgaagatcctttttgataatctcatgaccaaaatcccttaacgtgagttttcgttccactgagcgtcagaccccgtagaaaagatcaaaggatcttcttgagatcctttttttctgcgcgtaatctgctgcttgcaaacaaaaaaaccaccgctaccagcggtggtttgtttgccggatcaagagctaccaactctttttccgaaggtaactggcttcagcagagcgcagataccaaatactgtccttctagtgtagccgtagttaggccaccacttcaagaactctgtagcaccgcctacatacctcgctctgctaatcctgttaccagtggctgctgccagtggcgataagtcgtgtcttaccgggttggactcaagacgatagttaccggataaggcgcagcggtcgggctgaacggggggttcgtgcacacagcccagcttggagcgaacgacctacaccgaactgagatacctacagcgtgagctatgagaaagcgccacgcttcccgaagggagaaaggcggacaggtatccggtaagcggcagggtcggaacaggagagcgcacgagggagcttccagggggaaacgcctggtatctttatagtcctgtcgggtttcgccacctctgacttgagcgtcgatttttgtgatgctcgtcaggggggcggagcctatggaaaaacgccagcaacgcggcctttttacggttcctggccttttgctggccttttgctcacatgttctttcctgcgttatcccctgattctgtggataaccgtattaccgcctttgagtgagctgataccgctcgccgcagccgaacgaccgagcgcagcgagtcagtgagcgaggaagcggaagagcgcctgatgcggtattttctccttacgcatctgtgcggtatttcacaccgcatatggtgcactctcagtacaatctgctctgatgccgcatagttaagccagtatacactccgctatcgctacgtgactgggtcatggctgcgccccgacacccgccaacacccgctgacgcgccctgacgggcttgtctgctcccggcatccgcttacagacaagctgtgaccgtctccgggagctgcatgtgtcagaggttttcaccgtcatcaccgaaacgcgcgaggcagcagatcaattcgcgcgcgaaggcgaagcggcatgcatttacgttgacaccatcgaatggtgcaaaacctttcgcggtatggcatgatagcgcccggaagagagtcaattcagggtggtgaatgtgaaaccagtaacgttatacgatgtcgcagagtatgccggtgtctcttatcagaccgtttcccgcgtggtgaaccaggccagccacgtttctgcgaaaacgcgggaaaaagtggaagcggcgatggcggagctgaattacattcccaaccgcgtggcacaacaactggcgggcaaacagtcgttgctgattggcgttgccacctccagtctggccctgcacgcgccgtcgcaaattgtcgcggcgattaaatctcgcgccgatcaactgggtgccagcgtggtggtgtcgatggtagaacgaagcggcgtcgaagcctgtaaagcggcggtgcacaatcttctcgcgcaacgcgtcagtgggctgatcattaactatccgctggatgaccaggatgccattgctgtggaagctgcctgcactaatgttccggcgttatttcttgatgtctctgaccagacacccatcaacagtattattttctcccatgaagacggtacgcgactgggcgtggagcatctggtcgcattgggtcaccagcaaatcgcgctgttagcgggcccattaagttctgtctcggcgcgtctgcgtctggctggctggcataaatatctcactcgcaatcaaattcagccgatagcggaacgggaaggcgactggagtgccatgtccggttttcaacaaaccatgcaaatgctgaatgagggcatcgttcccactgcgatgctggttgccaacgatcagatggcgctgggcgcaatgcgcgccattaccgagtccgggctgcgcgttggtgcggatatctcggtagtgggatacgacgataccgaagacagctcatgttatatcccgccgtcaaccaccatcaaacaggattttcgcctgctggggcaaaccagcgtggaccgcttgctgcaactctctcagggccaggcggtgaagggcaatcagctgttgcccgtctcactggtgaaaagaaaaaccaccctggcgcccaatacgcaaaccgcctctccccgcgcgttggccgattcattaatgcagctggcacgacaggtttcccgactggaaagcgggcagtgagcgcaacgcaattaatgtgagttagcgcgaattgatctg

What is claimed is:

1. A method for producing a chemical product, said method comprising
i) combining a carbon source and a microorganism cell culture to produce a chemical product, wherein
a) said cell culture comprises an inhibitor of fatty acid synthase or said microorganism is genetically modified for reduced enzymatic activity in the organism's fatty acid synthase pathway, providing for reduced conversion of malonyl-CoA to fatty acids; and
b) wherein said chemical product is a polyketide produced by said microorganism via a metabolic pathway from malonyl-CoA to the polyketide chemical product.

2. A method for producing a chemical product, said method comprising
i) combining a carbon source and a microorganism cell culture to produce a selected chemical product, wherein
a) said cell culture comprises an inhibitor of fatty acid synthase or said microorganism is genetically modified for reduced enzymatic activity in the organism's fatty acid synthase pathway, providing for reduced conversion of malonyl-CoA to fatty acids; and
b) wherein said chemical product is produced by said microorganism via a genetic modification introducing a metabolic pathway from malonyl-CoA to the chemical product.

3. The method of any one of claim 1 or 2, wherein said carbon source has a ratio of carbon-14 to carbon-12 of about 1.0×10⁻¹⁴ or greater.

4. The method of any one of claim 1 or 2, wherein said carbon source is predominantly glucose, sucrose, fructose, dextrose, lactose, a combination thereof, or wherein said carbon source is less than 50% glycerol.

5. The method of claim 2, wherein the chemical product is not 3-hydroxypropionic acid or an acrylic-based consumer product made there from.

6. The method of any one of claim 1 or 2, wherein said cell culture comprises an inhibitor of fatty acid synthase or said microorganism is genetically modified for reduced enzymatic activity in the organism's fatty acid synthase pathway.

7. The method of claim 6, wherein said inhibitor of a fatty acid synthase is selected from the group consisting of thiolactomycin, triclosan, cerulenin, thienodiazaborine, isoniazid, and analogs thereof.

8. The method of any one of claim 1 or 2, wherein said microorganism is genetically modified for increased enzymatic activity of one or more enzymatic conversion steps from malonyl-CoA to the chemical product.

9. The method of claim 8, wherein at least one polynucleotide is provided into the microorganism cell that encodes a polypeptide that catalyzes a conversion step along the metabolic pathway.

10. The method of any one of claim 1 or 2, wherein the chemical product is selected from the group consisting of tetracycline, erythromycin, avermectin, macrolides, Vancomycin-group antibiotics, and Type II polyketides.

11. The method of claim 1, wherein the chemical product is selected from Table 1B.

12. The method of claim 2, wherein the chemical product is selected from Table 1C.

13. A recombinant microorganism of any one of the above claims.

14. A system for production of a selected chemical product according to any one of the above claims, said system comprising:
a fermentation tank suitable for microorganism cell culture;
a line for discharging contents from the fermentation tank to an extraction and/or separation vessel; and
an extraction and/or separation vessel suitable for removal of the chemical product from cell culture waste.

15. A genetically modified microorganism, wherein the microorganism comprises at least one genetic modification to increase polyketide production, and is capable of producing a polyketide at a specific rate selected from the rates of greater than 0.05 g/gDCW-hr, 0.08 g/gDCW-hr, greater than 0.1 g/gDCW-hr, greater than 0.13 g/gDCW-hr, greater than 0.15 g/gDCW-hr, greater than 0.175 g/gDCW-hr, greater than 0.2 g/gDCW-hr, greater than 0.25 g/gDCW-hr, greater than 0.3 g/gDCW-hr, greater than 0.35 g/gDCW-hr, greater than 0.4 g/gDCW-hr, greater than 0.45 g/gDCW-hr, or greater than 0.5 g/gDCW-hr.

16. The genetically modified microorganism of claim 15, said microorganism comprising genetic modifications to increase acetyl-coA carboxylase activity, and genetic modifications to reduce enoyl-ACP reductase activity, lactate dehydrogenase activity and acetate kinase activity.

17. The genetically modified microorganism of claim 15, said microorganism comprising genetic modifications to increase acetyl-coA carboxylase activity, and genetic modifications to reduce enoyl-ACP reductase activity, lactate dehydrogenase activity and acetylphosphate transferase activity.

18. The genetically modified microorganism of claim 15, said microorganism comprising genetic modifications to increase acetyl-coA carboxylase activity, and genetic modifications to reduce enoyl-ACP reductase activity, lactate dehydrogenase activity, acetate kinase activity and acetylphosphate transferase activity.

19. The genetically modified microorganism of claim 15, said microorganism comprising genetic modifications to increase acetyl-coA carboxylase activity, and genetic modifications to reduce enoyl-ACP reductase activity, lactate dehydrogenase activity and pyruvate formate lyase activity.

20. The genetically modified microorganism of claim 15, said microorganism comprising genetic modifications to increase acetyl-coA carboxylase activity, and genetic modifications to reduce enoyl-ACP reductase activity, lactate dehydrogenase activity and pyruvate oxidase activity.

21. The genetically modified microorganism of claim 15, said microorganism comprising genetic modifications to increase acetyl-coA carboxylase activity, and genetic modifications to reduce enoyl-ACP reductase activity, lactate dehydrogenase activity and methylglyoxal synthase activity.

22. The genetically modified microorganism of claim 15, said microorganism comprising genetic modifications to increase acetyl-coA carboxylase activity, and genetic modifications to increase β-ketoacyl-ACP synthase activity, lactate dehydrogenase activity and methylglyoxal synthase activity.

23. The genetically modified microorganism of claim 15, said microorganism comprising genetic modifications to increase acetyl-coA carboxylase activity, and genetic modifications to reduce enoyl-ACP reductase activity, guanosine 3′-diphosphate 5′-triphosphate synthase activity, and guanosine 3′-diphosphate 5′-diphosphate synthase activity.

24. The genetically modified microorganism of claim 15, wherein a further genetic modification has been made that increases NADH/NADPH transhydrogenase activity.

25. The genetically modified microorganism of claim 24, wherein the transhydrogenase activity is soluble.

26. The genetically modified microorganism of claim 24, wherein the transhydrogenase activity is membrane bound.

27. The genetically modified microorganism of claim 15, wherein a further genetic modification has been made that increases cyanase activity.

28. The genetically modified microorganism of claim 15, wherein a further genetic modification has been made that increases carbonic anhydrase activity.

29. The genetically modified microorganism of claim 15, wherein a further genetic modification has been made that increases pyruvate dehydrogenase activity.

30. A genetically modified microorganism comprising one or more components of the 3-HP toleragenic complex (3HPTGC) complex, wherein said increase in tolerance to 3-hydroxypropionic acid results from providing at least one genetic modification of each of Group A and Group B of the 3HPTGC.

31. The genetically modified microorganism of claim 30, additionally comprising a disruption of one or more 3HPTGC repressor genes.

32. The genetically modified microorganism of claim 31, wherein said repressor genes are selected from tyrR, trpR, metJ, purR, lysR, nrdR, and homologs thereof.
